United States Patent Application Publication US 2019/0365929 A1 - sequence listing, part 3

SEQ ID NO: 24560 - DNA, 20 bp, Artificial Sequence
  Description of Artificial Sequence: Synthetic oligonucleotide
  Target: COL7A1; (-) strand; PAM type: YTN; PAM sequence: CTT
ctgctcccaggaggatgaca

SEQ ID NO: 24561 - DNA, 20 bp, Artificial Sequence
  Description of Artificial Sequence: Synthetic oligonucleotide
  Target: COL7A1; (-) strand; PAM type: YTN; PAM sequence: CTG
tggtcttctgctcccaggag

SEQ ID NO: 24562 - DNA, 20 bp, Artificial Sequence
  Description of Artificial Sequence: Synthetic oligonucleotide
  Target: COL7A1; (-) strand; PAM type: YTN; PAM sequence: TTA
tggtccctgtggtcttctgc

SEQ ID NO: 24563 - DNA, 20 bp, Artificial Sequence
  Description of Artificial Sequence: Synthetic oligonucleotide
  Target: COL7A1; (-) strand; PAM type: YTN; PAM sequence: TTT
atggtccctgtggtcttctg

SEQ ID NO: 24564 - DNA, 20 bp, Artificial Sequence
  Description of Artificial Sequence: Synthetic oligonucleotide
  Target: COL7A1; (-) strand; PAM type: YTN; PAM sequence: CTT
tatggtccctgtggtcttct

SEQ ID NO: 24565 - DNA, 20 bp, Artificial Sequence
  Description of Artificial Sequence: Synthetic oligonucleotide
  Target: COL7A1; (-) strand; PAM type: YTN; PAM sequence: TTC
tttatggtccctgtggtctt

SEQ ID NO: 24566 - DNA, 20 bp, Artificial Sequence
  Description of Artificial Sequence: Synthetic oligonucleotide
  Target: COL7A1; (-) strand; PAM type: YTN; PAM sequence: CTG
tgggccatgggttctttatg

SEQ ID NO: 24567 - DNA, 20 bp, Artificial Sequence
  Description of Artificial Sequence: Synthetic oligonucleotide
  Target: COL7A1; (-) strand; PAM type: YTN; PAM sequence: TTC
ctgtgggccatgggttcttt

SEQ ID NO: 24568 - DNA, 20 bp, Artificial Sequence
  Description of Artificial Sequence: Synthetic oligonucleotide
  Target: COL7A1; (-) strand; PAM type: YTN; PAM sequence: CTT
cctgtgggccatgggttctt

SEQ ID NO: 24569 - DNA, 20 bp, Artificial Sequence
  Description of Artificial Sequence: Synthetic oligonucleotide
  Target: COL7A1; (-) strand; PAM type: YTN; PAM sequence: CTA
tgtccttcctgtgggccatg

SEQ ID NO: 24570 - DNA, 20 bp, Artificial Sequence
  Description of Artificial Sequence: Synthetic oligonucleotide
  Target: COL7A1; (-) strand; PAM type: YTN; PAM sequence: TTA
tgtgccctatgtccttcctg

SEQ ID NO: 24571 - DNA, 20 bp, Artificial Sequence
  Description of Artificial Sequence: Synthetic oligonucleotide
  Target: COL7A1; (-) strand; PAM type: YTN; PAM sequence: CTG
tattatgtgccctatgtcct

SEQ ID NO: 24572 - DNA, 20 bp, Artificial Sequence
  Description of Artificial Sequence: Synthetic oligonucleotide
  Target: COL7A1; (-) strand; PAM type: YTN; PAM sequence: CTC
accatagtccctgtattatg

SEQ ID NO: 24573 - DNA, 20 bp, Artificial Sequence
  Description of Artificial Sequence: Synthetic oligonucleotide
  Target: COL7A1; (-) strand; PAM type: YTN; PAM sequence: CTC
catgcagtctcaccatagtc

SEQ ID NO: 24574 - DNA, 20 bp, Artificial Sequence
  Description of Artificial Sequence: Synthetic oligonucleotide
  Target: COL7A1; (-) strand; PAM type: YTN; PAM sequence: CTG
gctccatgcagtctcaccat

SEQ ID NO: 24575 - DNA, 20 bp, Artificial Sequence
  Description of Artificial Sequence: Synthetic oligonucleotide
  Target: COL7A1; (-) strand; PAM type: YTN; PAM sequence: CTG
ggccctggctccatgcagtc

SEQ ID NO: 24576 - DNA, 20 bp, Artificial Sequence
  Description of Artificial Sequence: Synthetic oligonucleotide
  Target: COL7A1; (-) strand; PAM type: YTN; PAM sequence: CTG
acccctgggccctggctcca

SEQ ID NO: 24577 - DNA, 20 bp, Artificial Sequence
  Description of Artificial Sequence: Synthetic oligonucleotide
  Target: COL7A1; (-) strand; PAM type: YTN; PAM sequence: CTC
acccagcaccctgacccctg

SEQ ID NO: 24578 - DNA, 20 bp, Artificial Sequence
  Description of Artificial Sequence: Synthetic oligonucleotide
  Target: COL7A1; (-) strand; PAM type: YTN; PAM sequence: CTC
cctcacccagcaccctgacc

SEQ ID NO: 24579 - DNA, 20 bp, Artificial Sequence
  Description of Artificial Sequence: Synthetic oligonucleotide
  Target: COL7A1; (-) strand; PAM type: YTN; PAM sequence: CTA
cctccctcacccagcaccct

SEQ ID NO: 24580 - DNA, 20 bp, Artificial Sequence
  Description of Artificial Sequence: Synthetic oligonucleotide
  Target: COL7A1; (-) strand; PAM type: YTN; PAM sequence: CTG
gggccctacctccctcaccc

SEQ ID NO: 24581 - DNA, 20 bp, Artificial Sequence
  Description of Artificial Sequence: Synthetic oligonucleotide
  Target: COL7A1; (-) strand; PAM type: YTN; PAM sequence: CTG
ggtgggctggggccctacct

SEQ ID NO: 24582 - DNA, 20 bp, Artificial Sequence
  Description of Artificial Sequence: Synthetic oligonucleotide
  Target: COL7A1; (-) strand; PAM type: YTN; PAM sequence: CTG
ggtgggcctgggtgggctgg

SEQ ID NO: 24583 - DNA, 20 bp, Artificial Sequence
  Description of Artificial Sequence: Synthetic oligonucleotide
  Target: COL7A1; (-) strand; PAM type: YTN; PAM sequence: CTG
ggagggcctgggtgggcctg

SEQ ID NO: 24584 - DNA, 20 bp, Artificial Sequence
  Description of Artificial Sequence: Synthetic oligonucleotide
  Target: COL7A1; (-) strand; PAM type: YTN; PAM sequence: CTG
gatgggcctgggagggcctg

SEQ ID NO: 24585 - DNA, 20 bp, Artificial Sequence
  Description of Artificial Sequence: Synthetic oligonucleotide
  Target: COL7A1; (-) strand; PAM type: YTN; PAM sequence: CTG
acggtgagtgtgggcctgga

SEQ ID NO: 24586 - DNA, 20 bp, Artificial Sequence
  Description of Artificial Sequence: Synthetic oligonucleotide
  Target: COL7A1; (-) strand; PAM type: YTN; PAM sequence: CTG
cactgacggtgagtgtgggc

SEQ ID NO: 24587 - DNA, 20 bp, Artificial Sequence
  Description of Artificial Sequence: Synthetic oligonucleotide
  Target: COL7A1; (-) strand; PAM type: YTN; PAM sequence: CTC
gaggcgagaagggagaagct

SEQ ID NO: 24588 - DNA, 20 bp, Artificial Sequence
  Description of Artificial Sequence: Synthetic oligonucleotide
  Target: COL7A1; (-) strand; PAM type: YTN; PAM sequence: CTG
ccggtcctcgaggcgagaag

SEQ ID NO: 24589 - DNA, 20 bp, Artificial Sequence
  Description of Artificial Sequence: Synthetic oligonucleotide
  Target: COL7A1; (-) strand; PAM type: YTN; PAM sequence: TTG
cacataggggcggccagggc

SEQ ID NO: 24590 - DNA, 20 bp, Artificial Sequence
  Description of Artificial Sequence: Synthetic oligonucleotide
  Target: COL7A1; (-) strand; PAM type: YTN; PAM sequence: CTG
ttgcacataggggcggccag

SEQ ID NO: 24591 - DNA, 20 bp, Artificial Sequence
  Description of Artificial Sequence: Synthetic oligonucleotide
  Target: COL7A1; (-) strand; PAM type: YTN; PAM sequence: CTG
gtcccatctgttgcacatag

SEQ ID NO: 24592 - DNA, 20 bp, Artificial Sequence
  Description of Artificial Sequence: Synthetic oligonucleotide
  Target: COL7A1; (-) strand; PAM type: YTN; PAM sequence: CTG
aggtcagaggtcacagcctg

SEQ ID NO: 24593 - DNA, 20 bp, Artificial Sequence
  Description of Artificial Sequence: Synthetic oligonucleotide
  Target: COL7A1; (-) strand; PAM type: YTN; PAM sequence: TTG
tccctgaggtcagaggtcac

SEQ ID NO: 24594 - DNA, 20 bp, Artificial Sequence
  Description of Artificial Sequence: Synthetic oligonucleotide
  Target: COL7A1; (-) strand; PAM type: YTN; PAM sequence: CTG
ttgtccctgaggtcagaggt

SEQ ID NO: 24595 - DNA, 20 bp, Artificial Sequence
  Description of Artificial Sequence: Synthetic oligonucleotide
  Target: COL7A1; (-) strand; PAM type: YTN; PAM sequence: TTC
tgttgtccctgaggtcagag

SEQ ID NO: 24596 - DNA, 20 bp, Artificial Sequence
  Description of Artificial Sequence: Synthetic oligonucleotide
  Target: COL7A1; (-) strand; PAM type: YTN; PAM sequence: CTT
ctgttgtccctgaggtcaga

SEQ ID NO: 24597 - DNA, 20 bp, Artificial Sequence
  Description of Artificial Sequence: Synthetic oligonucleotide
  Target: COL7A1; (-) strand; PAM type: YTN; PAM sequence: TTG
ggtcagagatcggggtgact

SEQ ID NO: 24598 - DNA, 20 bp, Artificial Sequence
  Description of Artificial Sequence: Synthetic oligonucleotide
  Target: COL7A1; (-) strand; PAM type: YTN; PAM sequence: CTT
gggtcagagatcggggtgac

SEQ ID NO: 24599 - DNA, 20 bp, Artificial Sequence
  Description of Artificial Sequence: Synthetic oligonucleotide
  Target: COL7A1; (-) strand; PAM type: YTN; PAM sequence: TTC
caaggcttgggtcagagatc

SEQ ID NO: 24600 - DNA, 20 bp, Artificial Sequence
  Description of Artificial Sequence: Synthetic oligonucleotide
  Target: COL7A1; (-) strand; PAM type: YTN; PAM sequence: CTG
gcgagagaggggagcaggtg

SEQ ID NO: 24601 - DNA, 20 bp, Artificial Sequence
  Description of Artificial Sequence: Synthetic oligonucleotide
  Target: COL7A1; (-) strand; PAM type: YTN; PAM sequence: CTC
ctggcgagagaggggagcag

SEQ ID NO: 24602 - DNA, 20 bp, Artificial Sequence
  Description of Artificial Sequence: Synthetic oligonucleotide
  Target: COL7A1; (-) strand; PAM type: YTN; PAM sequence: CTG
gagctcctggcgagagaggg

SEQ ID NO: 24603 - DNA, 20 bp, Artificial Sequence
  Description of Artificial Sequence: Synthetic oligonucleotide
  Target: COL7A1; (-) strand; PAM type: YTN; PAM sequence: CTG
gggtccctggagctcctggc

SEQ ID NO: 24604 - DNA, 20 bp, Artificial Sequence
  Description of Artificial Sequence: Synthetic oligonucleotide
  Target: COL7A1; (-) strand; PAM type: YTN; PAM sequence: CTC
ctggggtccctggagctcct

SEQ ID NO: 24605 - DNA, 20 bp, Artificial Sequence
  Description of Artificial Sequence: Synthetic oligonucleotide
  Target: COL7A1; (-) strand; PAM type: YTN; PAM sequence: CTG
acagggtgagcgaggtcccc

SEQ ID NO: 24606 - DNA, 20 bp, Artificial Sequence
  Description of Artificial Sequence: Synthetic oligonucleotide
  Target: COL7A1; (-) strand; PAM type: YTN; PAM sequence: CTG
tgtctgacagggtgagcgag

SEQ ID NO: 24607 - DNA, 20 bp, Artificial Sequence
  Description of Artificial Sequence: Synthetic oligonucleotide
  Target: COL7A1; (-) strand; PAM type: YTN; PAM sequence: TTG
gtccctgtgtctgacagggt

SEQ ID NO: 24608 - DNA, 20 bp, Artificial Sequence
  Description of Artificial Sequence: Synthetic oligonucleotide
  Target: COL7A1; (-) strand; PAM type: YTN; PAM sequence: CTT
ggtccctgtgtctgacaggg

SEQ ID NO: 24609 - DNA, 20 bp, Artificial Sequence
  Description of Artificial Sequence: Synthetic oligonucleotide
  Target: COL7A1; (-) strand; PAM type: YTN; PAM sequence: CTC
acttggtccctgtgtctgac

SEQ ID NO: 24610 - DNA, 20 bp, Artificial Sequence
  Description of Artificial Sequence: Synthetic oligonucleotide
  Target: COL7A1; (-) strand; PAM type: YTN; PAM sequence: CTG
ctcacttggtccctgtgtct

SEQ ID NO: 24611 - DNA, 20 bp, Artificial Sequence
  Description of Artificial Sequence: Synthetic oligonucleotide
  Target: COL7A1; (-) strand; PAM type: YTN; PAM sequence: CTG
accctgctcacttggtccct

SEQ ID NO: 24612 - DNA, 20 bp, Artificial Sequence
  Description of Artificial Sequence: Synthetic oligonucleotide
  Target: COL7A1; (-) strand; PAM type: YTN; PAM sequence: CTC
tgaccctgctcacttggtcc

SEQ ID NO: 24613 - DNA, 20 bp, Artificial Sequence
  Description of Artificial Sequence: Synthetic oligonucleotide
  Target: COL7A1; (-) strand; PAM type: YTN; PAM sequence: CTG
cctctgaccctgctcacttg

SEQ ID NO: 24614 - DNA, 20 bp, Artificial Sequence
  Description of Artificial Sequence: Synthetic oligonucleotide
  Target: COL7A1; (-) strand; PAM type: YTN; PAM sequence: CTG
atccccactgcctctgaccc

SEQ ID NO: 24615 - DNA, 20 bp, Artificial Sequence
  Description of Artificial Sequence: Synthetic oligonucleotide
  Target: COL7A1; (-) strand; PAM type: YTN; PAM sequence: CTC
tgatccccactgcctctgac

SEQ ID NO: 24616 - DNA, 20 bp, Artificial Sequence
  Description of Artificial Sequence: Synthetic oligonucleotide
  Target: COL7A1; (-) strand; PAM type: YTN; PAM sequence: CTG
actctgatccccactgcctc

SEQ ID NO: 24617 - DNA, 20 bp, Artificial Sequence
  Description of Artificial Sequence: Synthetic oligonucleotide
  Target: COL7A1; (-) strand; PAM type: YTN; PAM sequence: CTG
cctgactctgatccccactg

SEQ ID NO: 24618 - DNA, 20 bp, Artificial Sequence
  Description of Artificial Sequence: Synthetic oligonucleotide
  Target: COL7A1; (-) strand; PAM type: YTN; PAM sequence: CTG
tggcccccaacctgcctgac

SEQ ID NO: 24619 - DNA, 20 bp, Artificial Sequence
  Description of Artificial Sequence: Synthetic oligonucleotide
  Target: COL7A1; (-) strand; PAM type: YTN; PAM sequence: CTG
aagctgtggcccccaacctg

SEQ ID NO: 24620 - DNA, 20 bp, Artificial Sequence
  Description of Artificial Sequence: Synthetic oligonucleotide
  Target: COL7A1; (-) strand; PAM type: YTN; PAM sequence: CTC
tgaagctgtggcccccaacc

SEQ ID NO: 24621 - DNA, 20 bp, Artificial Sequence
  Description of Artificial Sequence: Synthetic oligonucleotide
  Target: COL7A1; (-) strand; PAM type: YTN; PAM sequence: CTG
ccccaacctctgaagctgtg

SEQ ID NO: 24622 - DNA, 20 bp, Artificial Sequence
  Description of Artificial Sequence: Synthetic oligonucleotide
  Target: COL7A1; (-) strand; PAM type: YTN; PAM sequence: CTG
cctgccccaacctctgaagc

SEQ ID NO: 24623 - DNA, 20 bp, Artificial Sequence
  Description of Artificial Sequence: Synthetic oligonucleotide
  Target: COL7A1; (-) strand; PAM type: YTN; PAM sequence: TTC
cagcctgcctgccccaacct

SEQ ID NO: 24624 - DNA, 20 bp, Artificial Sequence
  Description of Artificial Sequence: Synthetic oligonucleotide
  Target: COL7A1; (-) strand; PAM type: YTN; PAM sequence: CTT
ccagcctgcctgccccaacc

SEQ ID NO: 24625 - DNA, 20 bp, Artificial Sequence
  Description of Artificial Sequence: Synthetic oligonucleotide
  Target: COL7A1; (-) strand; PAM type: YTN; PAM sequence: CTC
ataaccatcttccagcctgc

SEQ ID NO: 24626 - DNA, 20 bp, Artificial Sequence
  Description of Artificial Sequence: Synthetic oligonucleotide
  Target: COL7A1; (-) strand; PAM type: YTN; PAM sequence: TTC
caacctcataaccatcttcc

SEQ ID NO: 24627 - DNA, 20 bp, Artificial Sequence
  Description of Artificial Sequence: Synthetic oligonucleotide
  Target: COL7A1; (-) strand; PAM type: YTN; PAM sequence: CTT
ccaacctcataaccatcttc

SEQ ID NO: 24628 - DNA, 20 bp, Artificial Sequence
  Description of Artificial Sequence: Synthetic oligonucleotide
  Target: COL7A1; (-) strand; PAM type: YTN; PAM sequence: CTA
cccttccaacctcataacca

SEQ ID NO: 24629 - DNA, 20 bp, Artificial Sequence
  Description of Artificial Sequence: Synthetic oligonucleotide
  Target: COL7A1; (-) strand; PAM type: YTN; PAM sequence: TTC
cctacccttccaacctcata

SEQ ID NO: 24630 - DNA, 20 bp, Artificial Sequence
  Description of Artificial Sequence: Synthetic oligonucleotide
  Target: COL7A1; (-) strand; PAM type: YTN; PAM sequence: CTT
ccctacccttccaacctcat

SEQ ID NO: 24631 - DNA, 20 bp, Artificial Sequence
  Description of Artificial Sequence: Synthetic oligonucleotide
  Target: COL7A1; (-) strand; PAM type: YTN; PAM sequence: CTG
aaccttccctacccttccaa

SEQ ID NO: 24632 - DNA, 20 bp, Artificial Sequence
  Description of Artificial Sequence: Synthetic oligonucleotide
  Target: COL7A1; (-) strand; PAM type: YTN; PAM sequence: CTG
atccctgaaccttccctacc

SEQ ID NO: 24633 - DNA, 20 bp, Artificial Sequence
  Description of Artificial Sequence: Synthetic oligonucleotide
  Target: COL7A1; (-) strand; PAM type: YTN; PAM sequence: CTC
ctgatccctgaaccttccct

SEQ ID NO: 24634 - DNA, 20 bp, Artificial Sequence
  Description of Artificial Sequence: Synthetic oligonucleotide
  Target: COL7A1; (-) strand; PAM type: YTN; PAM sequence: CTG
actcctgatccctgaacctt

SEQ ID NO: 24635 - DNA, 20 bp, Artificial Sequence
  Description of Artificial Sequence: Synthetic oligonucleotide
  Target: COL7A1; (-) strand; PAM type: YTN; PAM sequence: CTC
tgactcctgatccctgaacc

SEQ ID NO: 24636 - DNA, 20 bp, Artificial Sequence
  Description of Artificial Sequence: Synthetic oligonucleotide
  Target: COL7A1; (-) strand; PAM type: YTN; PAM sequence: TTC
agggccagaaggtaaggggc

SEQ ID NO: 24637 - DNA, 20 bp, Artificial Sequence
  Description of Artificial Sequence: Synthetic oligonucleotide
  Target: COL7A1; (-) strand; PAM type: YTN; PAM sequence: CTT
cagggccagaaggtaagggg

SEQ ID NO: 24638 - DNA, 20 bp, Artificial Sequence
  Description of Artificial Sequence: Synthetic oligonucleotide
  Target: COL7A1; (-) strand; PAM type: YTN; PAM sequence: TTG
gtcccagaggccccgaagga

SEQ ID NO: 24639 - DNA, 20 bp, Artificial Sequence
  Description of Artificial Sequence: Synthetic oligonucleotide
  Target: COL7A1; (-) strand; PAM type: YTN; PAM sequence: CTG
gcagtgttggtcccagaggc

SEQ ID NO: 24640 - DNA, 20 bp, Artificial Sequence
  Description of Artificial Sequence: Synthetic oligonucleotide
  Target: COL7A1; (-) strand; PAM type: YTN; PAM sequence: CTG
gtcccccagggccacctggc

SEQ ID NO: 24641 - DNA, 20 bp, Artificial Sequence
  Description of Artificial Sequence: Synthetic oligonucleotide
  Target: COL7A1; (-) strand; PAM type: YTN; PAM sequence: CTG
ctggtcccccagggccacct

SEQ ID NO: 24642 - DNA, 20 bp, Artificial Sequence
  Description of Artificial Sequence: Synthetic oligonucleotide
  Target: COL7A1; (-) strand; PAM type: YTN; PAM sequence: CTC
tgctggtcccccagggccac

SEQ ID NO: 24643 - DNA, 20 bp, Artificial Sequence
  Description of Artificial Sequence: Synthetic oligonucleotide
  Target: COL7A1; (-) strand; PAM type: YTN; PAM sequence: TTC
ccaggccccagtggaaatga

SEQ ID NO: 24644 - DNA, 20 bp, Artificial Sequence
  Description of Artificial Sequence: Synthetic oligonucleotide
  Target: COL7A1; (-) strand; PAM type: YTN; PAM sequence: CTT
cccaggccccagtggaaatg

SEQ ID NO: 24645 - DNA, 20 bp, Artificial Sequence
  Description of Artificial Sequence: Synthetic oligonucleotide
  Target: COL7A1; (-) strand; PAM type: YTN; PAM sequence: TTG
ggggcttcccaggccccagt

SEQ ID NO: 24646 - DNA, 20 bp, Artificial Sequence
  Description of Artificial Sequence: Synthetic oligonucleotide
  Target: COL7A1; (-) strand; PAM type: YTN; PAM sequence: CTC
cccagggaaccccaggaatt

SEQ ID NO: 24647 - DNA, 20 bp, Artificial Sequence
  Description of Artificial Sequence: Synthetic oligonucleotide
  Target: COL7A1; (-) strand; PAM type: YTN; PAM sequence: CTA
tatctccccagggaacccca

SEQ ID NO: 24648 - DNA, 20 bp, Artificial Sequence
  Description of Artificial Sequence: Synthetic oligonucleotide
  Target: COL7A1; (-) strand; PAM type: YTN; PAM sequence: CTG
tcctatatctccccagggaa

SEQ ID NO: 24649 - DNA, 20 bp, Artificial Sequence
  Description of Artificial Sequence: Synthetic oligonucleotide
  Target: COL7A1; (-) strand; PAM type: YTN; PAM sequence: CTC
tgtcctatatctccccaggg

SEQ ID NO: 24650 - DNA, 20 bp, Artificial Sequence
  Description of Artificial Sequence: Synthetic oligonucleotide
  Target: COL7A1; (-) strand; PAM type: YTN; PAM sequence: CTG
actctgtcctatatctcccc

SEQ ID NO: 24651 - DNA, 20 bp, Artificial Sequence
  Description of Artificial Sequence: Synthetic oligonucleotide
  Target: COL7A1; (-) strand; PAM type: YTN; PAM sequence: TTA
ctgactctgtcctatatctc

SEQ ID NO: 24652 - DNA, 20 bp, Artificial Sequence
  Description of Artificial Sequence: Synthetic oligonucleotide
  Target: COL7A1; (-) strand; PAM type: YTN; PAM sequence: CTG
attactgactctgtcctata

SEQ ID NO: 24653 - DNA, 20 bp, Artificial Sequence
  Description of Artificial Sequence: Synthetic oligonucleotide
  Target: COL7A1; (-) strand; PAM type: YTN; PAM sequence: CTC
tgattactgactctgtccta

SEQ ID NO: 24654 - DNA, 20 bp, Artificial Sequence
  Description of Artificial Sequence: Synthetic oligonucleotide
  Target: COL7A1; (-) strand; PAM type: YTN; PAM sequence: CTG
gggcctctgattactgactc

SEQ ID NO: 24655 - DNA, 20 bp, Artificial Sequence
  Description of Artificial Sequence: Synthetic oligonucleotide
  Target: COL7A1; (-) strand; PAM type: YTN; PAM sequence: CTC
tggggcctctgattactgac

SEQ ID NO: 24656 - DNA, 20 bp, Artificial Sequence
  Description of Artificial Sequence: Synthetic oligonucleotide
  Target: COL7A1; (-) strand; PAM type: YTN; PAM sequence: TTG
ggagagggtccatctctggg

SEQ ID NO: 24657 - DNA, 20 bp, Artificial Sequence
  Description of Artificial Sequence: Synthetic oligonucleotide
  Target: COL7A1; (-) strand; PAM type: YTN; PAM sequence: TTT
gggagagggtccatctctgg

SEQ ID NO: 24658 - DNA, 20 bp, Artificial Sequence
  Description of Artificial Sequence: Synthetic oligonucleotide
  Target: COL7A1; (-) strand; PAM type: YTN; PAM sequence: CTT
tgggagagggtccatctctg

SEQ ID NO: 24659 - DNA, 20 bp, Artificial Sequence
  Description of Artificial Sequence: Synthetic oligonucleotide
  Target: COL7A1; (-) strand; PAM type: YTN; PAM sequence: TTG
aggggagcgtgcactttggg

SEQ ID NO: 24660 - DNA, 20 bp, Artificial Sequence
  Description of Artificial Sequence: Synthetic oligonucleotide
  Target: COL7A1; (-) strand; PAM type: YTN; PAM sequence: TTG
aagccatggtcatggtgaat

SEQ ID NO: 24661 - DNA, 20 bp, Artificial Sequence
  Description of Artificial Sequence: Synthetic oligonucleotide
  Target: COL7A1; (-) strand; PAM type: YTN; PAM sequence: TTG
acgggcagccaggccccaag

SEQ ID NO: 24662 - DNA, 20 bp, Artificial Sequence
  Description of Artificial Sequence: Synthetic oligonucleotide
  Target: COL7A1; (-) strand; PAM type: YTN; PAM sequence: TTT
gacgggcagccaggccccaa

SEQ ID NO: 24663 - DNA, 20 bp, Artificial Sequence
  Description of Artificial Sequence: Synthetic oligonucleotide
  Target: COL7A1; (-) strand; PAM type: YTN; PAM sequence: CTT
tgacgggcagccaggcccca

SEQ ID NO: 24664 - DNA, 20 bp, Artificial Sequence
  Description of Artificial Sequence: Synthetic oligonucleotide
  Target: COL7A1; (-) strand; PAM type: YTN; PAM sequence: TTC
ccagggtgaccgaggctttg

SEQ ID NO: 24665 - DNA, 20 bp, Artificial Sequence
  Description of Artificial Sequence: Synthetic oligonucleotide
  Target: COL7A1; (-) strand; PAM type: YTN; PAM sequence: CTG
ttcccagggtgaccgaggct

SEQ ID NO: 24666 - DNA, 20 bp, Artificial Sequence
  Description of Artificial Sequence: Synthetic oligonucleotide
  Target: COL7A1; (-) strand; PAM type: YTN; PAM sequence: TTC
tgttcccagggtgaccgagg

SEQ ID NO: 24667 - DNA, 20 bp, Artificial Sequence
  Description of Artificial Sequence: Synthetic oligonucleotide
  Target: COL7A1; (-) strand; PAM type: YTN; PAM sequence: CTT
ctgttcccagggtgaccgag

SEQ ID NO: 24668 - DNA, 20 bp, Artificial Sequence
  Description of Artificial Sequence: Synthetic oligonucleotide
  Target: COL7A1; (-) strand; PAM type: YTN; PAM sequence: TTC
ttctgttcccagggtgaccg

SEQ ID NO: 24669 - DNA, 20 bp, Artificial Sequence
  Description of Artificial Sequence: Synthetic oligonucleotide
  Target: COL7A1; (-) strand; PAM type: YTN; PAM sequence: CTT
cttctgttcccagggtgacc

SEQ ID NO: 24670 - DNA, 20 bp, Artificial Sequence
  Description of Artificial Sequence: Synthetic oligonucleotide
  Target: COL7A1; (-) strand; PAM type: YTN; PAM sequence: CTC
atgcttcttctgttcccagg

SEQ ID NO: 24671 - DNA, 20 bp, Artificial Sequence
  Description of Artificial Sequence: Synthetic oligonucleotide
  Target: COL7A1; (-) strand; PAM type: YTN; PAM sequence: CTC
tcatgcttcttctgttccca

SEQ ID NO: 24672 - DNA, 20 bp, Artificial Sequence
  Description of Artificial Sequence: Synthetic oligonucleotide
  Target: COL7A1; (-) strand; PAM type: YTN; PAM sequence: CTG
agggaggtcagggcagaagg

SEQ ID NO: 24673 - DNA, 20 bp, Artificial Sequence
  Description of Artificial Sequence: Synthetic oligonucleotide
  Target: COL7A1; (-) strand; PAM type: YTN; PAM sequence: TTC
cagagctgagggaggtcagg

SEQ ID NO: 24674 - DNA, 20 bp, Artificial Sequence
  Description of Artificial Sequence: Synthetic oligonucleotide
  Target: COL7A1; (-) strand; PAM type: YTN; PAM sequence: TTC
agggaggttccagagctgag

SEQ ID NO: 24675 - DNA, 20 bp, Artificial Sequence
  Description of Artificial Sequence: Synthetic oligonucleotide
  Target: COL7A1; (-) strand; PAM type: YTN; PAM sequence: CTC
atgggagttcagggaggttc

SEQ ID NO: 24676 - DNA, 20 bp, Artificial Sequence
  Description of Artificial Sequence: Synthetic oligonucleotide
  Target: COL7A1; (-) strand; PAM type: YTN; PAM sequence: TTA
ggccagggagctcatgggag

SEQ ID NO: 24677 - DNA, 20 bp, Artificial Sequence
  Description of Artificial Sequence: Synthetic oligonucleotide
  Target: COL7A1; (-) strand; PAM type: YTN; PAM sequence: TTG
ggcattaggccagggagctc

SEQ ID NO: 24678 - DNA, 20 bp, Artificial Sequence
  Description of Artificial Sequence: Synthetic oligonucleotide
  Target: COL7A1; (-) strand; PAM type: YTN; PAM sequence: TTT
gggcattaggccagggagct

SEQ ID NO: 24679 - DNA, 20 bp, Artificial Sequence
  Description of Artificial Sequence: Synthetic oligonucleotide
  Target: COL7A1; (-) strand; PAM type: YTN; PAM sequence: TTA
cagaaggtttgggcattagg

SEQ ID NO: 24680 - DNA, 20 bp, Artificial Sequence
  Description of Artificial Sequence: Synthetic oligonucleotide
  Target: COL7A1; (-) strand; PAM type: YTN; PAM sequence: TTG
ggttacagaaggtttgggca

SEQ ID NO: 24681 - DNA, 20 bp, Artificial Sequence
  Description of Artificial Sequence: Synthetic oligonucleotide
  Target: COL7A1; (-) strand; PAM type: YTN; PAM sequence: CTT
gggttacagaaggtttgggc

SEQ ID NO: 24682 - DNA, 20 bp, Artificial Sequence
  Description of Artificial Sequence: Synthetic oligonucleotide
  Target: COL7A1; (-) strand; PAM type: YTN; PAM sequence: CTC
acaggtgcttgggttacaga

SEQ ID NO: 24683 - DNA, 20 bp, Artificial Sequence
  Description of Artificial Sequence: Synthetic oligonucleotide
  Target: COL7A1; (-) strand; PAM type: YTN; PAM sequence: TTG
gctcacaggtgcttgggtta

SEQ ID NO: 24684 - DNA, 20 bp, Artificial Sequence
  Description of Artificial Sequence: Synthetic oligonucleotide
  Target: COL7A1; (-) strand; PAM type: YTN; PAM sequence: CTG
gttggctcacaggtgcttgg

SEQ ID NO: 24685 - DNA, 20 bp, Artificial Sequence
  Description of Artificial Sequence: Synthetic oligonucleotide
  Target: COL7A1; (-) strand; PAM type: YTN; PAM sequence: TTG
gagtcatggggatcacatct

SEQ ID NO: 24686 - DNA, 20 bp, Artificial Sequence
  Description of Artificial Sequence: Synthetic oligonucleotide
  Target: COL7A1; (-) strand; PAM type: YTN; PAM sequence: CTA
tagtggagttggagtcatgg

SEQ ID NO: 24687 - DNA, 20 bp, Artificial Sequence
  Description of Artificial Sequence: Synthetic oligonucleotide
  Target: COL7A1; (-) strand; PAM type: YTN; PAM sequence: TTA
ggatgaaagcatgggaggtg

SEQ ID NO: 24688 - DNA, 20 bp, Artificial Sequence
  Description of Artificial Sequence: Synthetic oligonucleotide
  Target: COL7A1; (-) strand; PAM type: YTN; PAM sequence: TTG
gggtcacagtggagttagga

SEQ ID NO: 24689 - DNA, 20 bp, Artificial Sequence
  Description of Artificial Sequence: Synthetic oligonucleotide
  Target: COL7A1; (-) strand; PAM type: YTN; PAM sequence: CTC
gaggtgtcaaggtgggttgg

SEQ ID NO: 24690 - DNA, 20 bp, Artificial Sequence
  Description of Artificial Sequence: Synthetic oligonucleotide
  Target: COL7A1; (-) strand; PAM type: YTN; PAM sequence: CTG
gtctcgaggtgtcaaggtgg

SEQ ID NO: 24691 - DNA, 20 bp, Artificial Sequence
  Description of Artificial Sequence: Synthetic oligonucleotide
  Target: COL7A1; (-) strand; PAM type: YTN; PAM sequence: CTG
aagtggggctggtctcgagg

SEQ ID NO: 24692 - DNA, 20 bp, Artificial Sequence
  Description of Artificial Sequence: Synthetic oligonucleotide
  Target: COL7A1; (-) strand; PAM type: YTN; PAM sequence: TTG
ggggctgaagtggggctggt

SEQ ID NO: 24693 - DNA, 20 bp, Artificial Sequence
  Description of Artificial Sequence: Synthetic oligonucleotide
  Target: COL7A1; (-) strand; PAM type: YTN; PAM sequence: TTT
gggggctgaagtggggctgg

SEQ ID NO: 24694 - DNA, 20 bp, Artificial Sequence
  Description of Artificial Sequence: Synthetic oligonucleotide
  Target: COL7A1; (-) strand; PAM type: YTN; PAM sequence: CTT
tgggggctgaagtggggctg

SEQ ID NO: 24695 - DNA, 20 bp, Artificial Sequence
  Description of Artificial Sequence: Synthetic oligonucleotide
  Target: COL7A1; (-) strand; PAM type: YTN; PAM sequence: TTG
ggactttgggggctgaagtg

SEQ ID NO: 24696 - DNA, 20 bp, Artificial Sequence
  Description of Artificial Sequence: Synthetic oligonucleotide
  Target: COL7A1; (-) strand; PAM type: YTN; PAM sequence: CTG
tagagggttgggactttggg

SEQ ID NO: 24697 - DNA, 20 bp, Artificial Sequence
  Description of Artificial Sequence: Synthetic oligonucleotide
  Target: COL7A1; (-) strand; PAM type: YTN; PAM sequence: CTC
atggtcgggtcatgggggtg

SEQ ID NO: 24698 - DNA, 20 bp, Artificial Sequence
  Description of Artificial Sequence: Synthetic oligonucleotide
  Target: COL7A1; (-) strand; PAM type: YTN; PAM sequence: CTG
tggacagtggacatgacagg

SEQ ID NO: 24699 - DNA, 20 bp, Artificial Sequence
  Description of Artificial Sequence: Synthetic oligonucleotide
  Target: COL7A1; (-) strand; PAM type: YTN; PAM sequence: CTG
atcggtcccaaggtacaggg

SEQ ID NO: 24700 - DNA, 20 bp, Artificial Sequence
  Description of Artificial Sequence: Synthetic oligonucleotide
  Target: COL7A1; (-) strand; PAM type: YTN; PAM sequence: CTG
gcaaggagggcctgatcggt

SEQ ID NO: 24701 - DNA, 20 bp, Artificial Sequence
  Description of Artificial Sequence: Synthetic oligonucleotide
  Target: COL7A1; (-) strand; PAM type: YTN; PAM sequence: CTG
gtgtgccgggccagtcgggg

SEQ ID NO: 24702 - DNA, 20 bp, Artificial Sequence
  Description of Artificial Sequence: Synthetic oligonucleotide
  Target: COL7A1; (-) strand; PAM type: YTN; PAM sequence: CTC
cagggggagcctggtgtgcc

SEQ ID NO: 24703 - DNA, 20 bp, Artificial Sequence
  Description of Artificial Sequence: Synthetic oligonucleotide
  Target: COL7A1; (-) strand; PAM type: YTN; PAM sequence: TTC
tccagggggagcctggtgtg

SEQ ID NO: 24704 - DNA, 20 bp, Artificial Sequence
  Description of Artificial Sequence: Synthetic oligonucleotide
  Target: COL7A1; (-) strand; PAM type: YTN; PAM sequence: TTT
ctccagggggagcctggtgt

SEQ ID NO: 24705 - DNA, 20 bp, Artificial Sequence
  Description of Artificial Sequence: Synthetic oligonucleotide
  Target: COL7A1; (-) strand; PAM type: YTN; PAM sequence: TTT
tctccagggggagcctggtg

SEQ ID NO: 24706 - DNA, 20 bp, Artificial Sequence
  Description of Artificial Sequence: Synthetic oligonucleotide
  Target: COL7A1; (-) strand; PAM type: YTN; PAM sequence: TTT
ttctccagggggagcctggt

SEQ ID NO: 24707 - DNA, 20 bp, Artificial Sequence
  Description of Artificial Sequence: Synthetic oligonucleotide
  Target: COL7A1; (-) strand; PAM type: YTN; PAM sequence: TTT
tttctccagggggagcctgg

SEQ ID NO: 24708 - DNA, 20 bp, Artificial Sequence
  Description of Artificial Sequence: Synthetic oligonucleotide
  Target: COL7A1; (-) strand; PAM type: YTN; PAM sequence: TTT
ttttctccagggggagcctg

SEQ ID NO: 24709 - DNA, 20 bp, Artificial Sequence
  Description of Artificial Sequence: Synthetic oligonucleotide
  Target: COL7A1; (-) strand; PAM type: YTN; PAM sequence: CTT
tttttctccagggggagcct

SEQ ID NO: 24710 - DNA, 20 bp, Artificial Sequence
  Description of Artificial Sequence: Synthetic oligonucleotide
  Target: COL7A1; (-) strand; PAM type: YTN; PAM sequence: TTC
atgtctttttttctccaggg

SEQ ID NO: 24711 - DNA, 20 bp, Artificial Sequence
  Description of Artificial Sequence: Synthetic oligonucleotide
  Target: COL7A1; (-) strand; PAM type: YTN; PAM sequence: CTC
agaatgagggggccacgggt

SEQ ID NO: 24712 - DNA, 20 bp, Artificial Sequence
  Description of Artificial Sequence: Synthetic oligonucleotide
  Target: COL7A1; (-) strand; PAM type: YTN; PAM sequence: CTG
gcaggacacaaaggagagat

SEQ ID NO: 24713 - DNA, 20 bp, Artificial Sequence
  Description of Artificial Sequence: Synthetic oligonucleotide
  Target: COL7A1; (-) strand; PAM type: YTN; PAM sequence: CTG
gtcccccaggccgccccggg

SEQ ID NO: 24714 - DNA, 20 bp, Artificial Sequence
  Description of Artificial Sequence: Synthetic oligonucleotide
  Target: COL7A1; (-) strand; PAM type: YTN; PAM sequence: CTG
cagggagaagctggtccccc

SEQ ID NO: 24715 - DNA, 20 bp, Artificial Sequence
  Description of Artificial Sequence: Synthetic oligonucleotide
  Target: COL7A1; (-) strand; PAM type: YTN; PAM sequence: CTG
atgcctgcagggagaagctg

SEQ ID NO: 24716 - DNA, 20 bp, Artificial Sequence
  Description of Artificial Sequence: Synthetic oligonucleotide
  Target: COL7A1; (-) strand; PAM type: YTN; PAM sequence: CTG
cctgatgcctgcagggagaa

SEQ ID NO: 24717 - DNA, 20 bp, Artificial Sequence
  Description of Artificial Sequence: Synthetic oligonucleotide
  Target: COL7A1; (-) strand; PAM type: YTN; PAM sequence: CTC
accccactgcctgatgcctg

SEQ ID NO: 24718 - DNA, 20 bp, Artificial Sequence
  Description of Artificial Sequence: Synthetic oligonucleotide
  Target: COL7A1; (-) strand; PAM type: YTN; PAM sequence: CTA
aggctcaccccactgcctga

SEQ ID NO: 24719 - DNA, 20 bp, Artificial Sequence
  Description of Artificial Sequence: Synthetic oligonucleotide
  Target: COL7A1; (-) strand; PAM type: YTN; PAM sequence: CTG
gggcctaaggctcaccccac

SEQ ID NO: 24720 - DNA, 20 bp, Artificial Sequence
  Description of Artificial Sequence: Synthetic oligonucleotide
  Target: COL7A1; (-) strand; PAM type: YTN; PAM sequence: CTA
cgtggcctggggcctaaggc

SEQ ID NO: 24721 - DNA, 20 bp, Artificial Sequence
  Description of Artificial Sequence: Synthetic oligonucleotide
  Target: COL7A1; (-) strand; PAM type: YTN; PAM sequence: CTG
gggggctacgtggcctgggg

SEQ ID NO: 24722 - DNA, 20 bp, Artificial Sequence
  Description of Artificial Sequence: Synthetic oligonucleotide
  Target: COL7A1; (-) strand; PAM type: YTN; PAM sequence: TTG
atggagagaagggagacaag

SEQ ID NO: 24723 - DNA, 20 bp, Artificial Sequence
  Description of Artificial Sequence: Synthetic oligonucleotide
  Target: COL7A1; (-) strand; PAM type: YTN; PAM sequence: CTT
gatggagagaagggagacaa

SEQ ID NO: 24724 - DNA, 20 bp, Artificial Sequence
  Description of Artificial Sequence: Synthetic oligonucleotide
  Target: COL7A1; (-) strand; PAM type: YTN; PAM sequence: CTG
tggccttgatggagagaagg

SEQ ID NO: 24725 - DNA, 20 bp, Artificial Sequence
  Description of Artificial Sequence: Synthetic oligonucleotide
  Target: COL7A1; (-) strand; PAM type: YTN; PAM sequence: CTC
agggtgaacggggagtgaag

SEQ ID NO: 24726 - DNA, 20 bp, Artificial Sequence
  Description of Artificial Sequence: Synthetic oligonucleotide
  Target: COL7A1; (-) strand; PAM type: YTN; PAM sequence: CTC
cctcagggtgaacggggagt

SEQ ID NO: 24727 - DNA, 20 bp, Artificial Sequence
  Description of Artificial Sequence: Synthetic oligonucleotide
  Target: COL7A1; (-) strand; PAM type: YTN; PAM sequence: TTC
tccctcagggtgaacgggga

SEQ ID NO: 24728 - DNA, 20 bp, Artificial Sequence
  Description of Artificial Sequence: Synthetic oligonucleotide
  Target: COL7A1; (-) strand; PAM type: YTN; PAM sequence: TTT
ctccctcagggtgaacgggg

SEQ ID NO: 24729 - DNA, 20 bp, Artificial Sequence
  Description of Artificial Sequence: Synthetic oligonucleotide
  Target: COL7A1; (-) strand; PAM type: YTN; PAM sequence: TTT
tctccctcagggtgaacggg

SEQ ID NO: 24730 - DNA, 20 bp, Artificial Sequence
  Description of Artificial Sequence: Synthetic oligonucleotide
  Target: COL7A1; (-) strand; PAM type: YTN; PAM sequence: CTT
ttctccctcagggtgaacgg

SEQ ID NO: 24731 - DNA, 20 bp, Artificial Sequence
  Description of Artificial Sequence: Synthetic oligonucleotide
  Target: COL7A1; (-) strand; PAM type: YTN; PAM sequence: CTG
cttttctccctcagggtgaa

SEQ ID NO: 24732 - DNA, 20 bp, Artificial Sequence
  Description of Artificial Sequence: Synthetic oligonucleotide
  Target: COL7A1; (-) strand; PAM type: YTN; PAM sequence: TTC
atctgcttttctccctcagg

SEQ ID NO: 24733 - DNA, 20 bp, Artificial Sequence
  Description of Artificial Sequence: Synthetic oligonucleotide
  Target: COL7A1; (-) strand; PAM type: YTN; PAM sequence: CTT
catctgcttttctccctcag

SEQ ID NO: 24734 - DNA, 20 bp, Artificial Sequence
  Description of Artificial Sequence: Synthetic oligonucleotide
  Target: COL7A1; (-) strand; PAM type: YTN; PAM sequence: TTC
ttcatctgcttttctccctc

SEQ ID NO: 24735 - DNA, 20 bp, Artificial Sequence
  Description of Artificial Sequence: Synthetic oligonucleotide
  Target: COL7A1; (-) strand; PAM type: YTN; PAM sequence: CTT
cttcatctgcttttctccct

SEQ ID NO: 24736 - DNA, 20 bp, Artificial Sequence
  Description of Artificial Sequence: Synthetic oligonucleotide
  Target: COL7A1; (-) strand; PAM type: YTN; PAM sequence: CTG
ggaatcacttcttcatctgc

SEQ ID NO: 24737 - DNA, 20 bp, Artificial Sequence
  Description of Artificial Sequence: Synthetic oligonucleotide
  Target: COL7A1; (-) strand; PAM type: YTN; PAM sequence: TTC
agggtgaagggggtcacaga

SEQ ID NO: 24738 - DNA, 20 bp, Artificial Sequence
  Description of Artificial Sequence: Synthetic oligonucleotide
  Target: COL7A1; (-) strand; PAM type: YTN; PAM sequence: TTT
cagggtgaagggggtcacag

SEQ ID NO: 24739 - DNA, 20 bp, Artificial Sequence
  Description of Artificial Sequence: Synthetic oligonucleotide
  Target: COL7A1; (-) strand; PAM type: YTN; PAM sequence: TTA
gtttcagggtgaagggggtc

SEQ ID NO: 24740 - DNA, 20 bp, Artificial Sequence
  Description of Artificial Sequence: Synthetic oligonucleotide
  Target: COL7A1; (-) strand; PAM type: YTN; PAM sequence: TTG
gagagttagtttcagggtga

SEQ ID NO: 24741 - DNA, 20 bp, Artificial Sequence
  Description of Artificial Sequence: Synthetic oligonucleotide
  Target: COL7A1; (-) strand; PAM type: YTN; PAM sequence: TTT
ggagagttagtttcagggtg

SEQ ID NO: 24742 - DNA, 20 bp, Artificial Sequence
  Description of Artificial Sequence: Synthetic oligonucleotide
  Target: COL7A1; (-) strand; PAM type: YTN; PAM sequence: CTG
tttggagagttagtttcagg

SEQ ID NO: 24743 - DNA, 20 bp, Artificial Sequence
  Description of Artificial Sequence: Synthetic oligonucleotide
  Target: COL7A1; (-) strand; PAM type: YTN; PAM sequence: CTG
aggcctgtttggagagttag

SEQ ID NO: 24744 - DNA, 20 bp, Artificial Sequence
  Description of Artificial Sequence: Synthetic oligonucleotide
  Target: COL7A1; (-) strand; PAM type: YTN; PAM sequence: TTG
gagtagctgaggcctgtttg

SEQ ID NO: 24745 - DNA, 20 bp, Artificial Sequence
  Description of Artificial Sequence: Synthetic oligonucleotide
  Target: COL7A1; (-) strand; PAM type: YTN; PAM sequence: CTG
ggtcagaggttggagtagct

SEQ ID NO: 24746 - DNA, 20 bp, Artificial Sequence
  Description of Artificial Sequence: Synthetic oligonucleotide
  Target: COL7A1; (-) strand; PAM type: YTN; PAM sequence: TTA
gggcactgggtcagaggttg

SEQ ID NO: 24747 - DNA, 20 bp, Artificial Sequence
  Description of Artificial Sequence: Synthetic oligonucleotide
  Target: COL7A1; (-) strand; PAM type: YTN; PAM sequence: CTG
gggtcagatattagggcact

SEQ ID NO: 24748 - DNA, 20 bp, Artificial Sequence
  Description of Artificial Sequence: Synthetic oligonucleotide
  Target: COL7A1; (-) strand; PAM type: YTN; PAM sequence: TTG
aagggcgagggacctggggt

SEQ ID NO: 24749 - DNA, 20 bp, Artificial Sequence
  Description of Artificial Sequence: Synthetic oligonucleotide
  Target: COL7A1; (-) strand; PAM type: YTN; PAM sequence: CTA
atgttgaagggcgagggacc

SEQ ID NO: 24750 - DNA, 20 bp, Artificial Sequence
  Description of Artificial Sequence: Synthetic oligonucleotide
  Target: COL7A1; (-) strand; PAM type: YTN; PAM sequence: CTG
gtcaggaaggcctaatgttg

SEQ ID NO: 24751 - DNA, 20 bp, Artificial Sequence
  Description of Artificial Sequence: Synthetic oligonucleotide
  Target: COL7A1; (-) strand; PAM type: YTN; PAM sequence: TTC
tggtcaggaaggcctaatgt

SEQ ID NO: 24752 - DNA, 20 bp, Artificial Sequence
  Description of Artificial Sequence: Synthetic oligonucleotide
  Target: COL7A1; (-) strand; PAM type: YTN; PAM sequence: TTT
ctggtcaggaaggcctaatg

SEQ ID NO: 24753 - DNA, 20 bp, Artificial Sequence
  Description of Artificial Sequence: Synthetic oligonucleotide
  Target: COL7A1; (-) strand; PAM type: YTN; PAM sequence: TTT
tctggtcaggaaggcctaat

SEQ ID NO: 24754 - DNA, 20 bp, Artificial Sequence
  Description of Artificial Sequence: Synthetic oligonucleotide
  Target: COL7A1; (-) strand; PAM type: YTN; PAM sequence: TTT
ttctggtcaggaaggcctaa

SEQ ID NO: 24755 - DNA, 20 bp, Artificial Sequence
  Description of Artificial Sequence: Synthetic oligonucleotide
  Target: COL7A1; (-) strand; PAM type: YTN; PAM sequence: TTT
tttctggtcaggaaggccta

SEQ ID NO: 24756 - DNA, 20 bp, Artificial Sequence
  Description of Artificial Sequence: Synthetic oligonucleotide
  Target: COL7A1; (-) strand; PAM type: YTN; PAM sequence: TTT
ttttctggtcaggaaggcct

SEQ ID NO: 24757 - DNA, 20 bp, Artificial Sequence
  Description of Artificial Sequence: Synthetic oligonucleotide
  Target: COL7A1; (-) strand; PAM type: YTN; PAM sequence: TTG
gtttttttctggtcaggaag

SEQ ID NO: 24758 - DNA, 20 bp, Artificial Sequence
  Description of Artificial Sequence: Synthetic oligonucleotide
  Target: COL7A1; (-) strand; PAM type: YTN; PAM sequence: CTC
aaggtaggaaagaaacaaga

SEQ ID NO: 24759 - DNA, 20 bp, Artificial Sequence
  Description of Artificial Sequence: Synthetic oligonucleotide
  Target: COL7A1; (-) strand; PAM type: YTN; PAM sequence: TTC
atgggtccccggggcctcaa

SEQ ID NO: 24760 - DNA, 20 bp, Artificial Sequence
  Description of Artificial Sequence: Synthetic oligonucleotide
  Target: COL7A1; (-) strand; PAM type: YTN; PAM sequence: CTT
catgggtccccggggcctca

SEQ ID NO: 24761 - DNA, 20 bp, Artificial Sequence
  Description of Artificial Sequence: Synthetic oligonucleotide
  Target: COL7A1; (-) strand; PAM type: YTN; PAM sequence: TTG
gcttcatgggtccccggggc

SEQ ID NO: 24762 - DNA, 20 bp, Artificial Sequence
  Description of Artificial Sequence: Synthetic oligonucleotide
  Target: COL7A1; (-) strand; PAM type: YTN; PAM sequence: CTG
gtatccgaggagaaaaagga

SEQ ID NO: 24763 - DNA, 20 bp, Artificial Sequence
  Description of Artificial Sequence: Synthetic oligonucleotide
  Target: COL7A1; (-) strand; PAM type: YTN; PAM sequence: CTA
gggatccccaggaaaggatg

SEQ ID NO: 24764 - DNA, 20 bp, Artificial Sequence
  Description of Artificial Sequence: Synthetic oligonucleotide
  Target: COL7A1; (-) strand; PAM type: YTN; PAM sequence: CTG
ctagggatccccaggaaagg

SEQ ID NO: 24765 - DNA, 20 bp, Artificial Sequence
  Description of Artificial Sequence: Synthetic oligonucleotide
  Target: COL7A1; (-) strand; PAM type: YTN; PAM sequence: CTC
cctgctagggatccccagga

SEQ ID NO: 24766 - DNA, 20 bp, Artificial Sequence
  Description of Artificial Sequence: Synthetic oligonucleotide
  Target: COL7A1; (-) strand; PAM type: YTN; PAM sequence: CTC
tccctgctagggatccccag

SEQ ID NO: 24767 - DNA, 20 bp, Artificial Sequence
  Description of Artificial Sequence: Synthetic oligonucleotide
  Target: COL7A1; (-) strand; PAM type: YTN; PAM sequence: CTC
acatggaccctctccctgct

SEQ ID NO: 24768 - DNA, 20 bp, Artificial Sequence
  Description of Artificial Sequence: Synthetic oligonucleotide
  Target: COL7A1; (-) strand; PAM type: YTN; PAM sequence: CTG
acctcacatggaccctctcc

SEQ ID NO: 24769 - DNA, 20 bp, Artificial Sequence
  Description of Artificial Sequence: Synthetic oligonucleotide
  Target: COL7A1; (-) strand; PAM type: YTN; PAM sequence: CTC
tgacctcacatggaccctct

SEQ ID NO: 24770 - DNA, 20 bp, Artificial Sequence
  Description of Artificial Sequence: Synthetic oligonucleotide
  Target: COL7A1; (-) strand; PAM type: YTN; PAM sequence: CTC
ctctgacctcacatggaccc

SEQ ID NO: 24771 - DNA, 20 bp, Artificial Sequence
  Description of Artificial Sequence: Synthetic oligonucleotide
  Target: COL7A1; (-) strand; PAM type: YTN; PAM sequence: CTG
acctcctctgacctcacatg

SEQ ID NO: 24772 - DNA, 20 bp, Artificial Sequence
  Description of Artificial Sequence: Synthetic oligonucleotide
  Target: COL7A1; (-) strand; PAM type: YTN; PAM sequence: CTC
actgacctcctctgacctca

SEQ ID NO: 24773 - DNA, 20 bp, Artificial Sequence
  Description of Artificial Sequence: Synthetic oligonucleotide
  Target: COL7A1; (-) strand; PAM type: YTN; PAM sequence: TTG
gtccctcactgacctcctct

SEQ ID NO: 24774 - DNA, 20 bp, Artificial Sequence
  Description of Artificial Sequence: Synthetic oligonucleotide
  Target: COL7A1; (-) strand; PAM type: YTN; PAM sequence: TTT
ggtccctcactgacctcctc

SEQ ID NO: 24775 - DNA, 20 bp, Artificial Sequence
  Description of Artificial Sequence: Synthetic oligonucleotide
  Target: COL7A1; (-) strand; PAM type: YTN; PAM sequence: CTT
tggtccctcactgacctcct

SEQ ID NO: 24776 - DNA, 20 bp, Artificial Sequence
  Description of Artificial Sequence: Synthetic oligonucleotide
  Target: COL7A1; (-) strand; PAM type: YTN; PAM sequence: CTC
tttggtccctcactgacctc

SEQ ID NO: 24777 - DNA, 20 bp, Artificial Sequence
  Description of Artificial Sequence: Synthetic oligonucleotide
  Target: COL7A1; (-) strand; PAM type: YTN; PAM sequence: TTC
tctttggtccctcactgacc

SEQ ID NO: 24778 - DNA, 20 bp, Artificial Sequence
  Description of Artificial Sequence: Synthetic oligonucleotide
  Target: COL7A1; (-) strand; PAM type: YTN; PAM sequence: CTA
tccagggcgattctctttgg

SEQ ID NO: 24779 - DNA, 20 bp, Artificial Sequence
  Description of Artificial Sequence: Synthetic oligonucleotide
  Target: COL7A1; (-) strand; PAM type: YTN; PAM sequence: CTA
cccactatccagggcgattc

SEQ ID NO: 24780 - DNA, 20 bp, Artificial Sequence
  Description of Artificial Sequence: Synthetic oligonucleotide
  Target: COL7A1; (-) strand; PAM type: YTN; PAM sequence: TTC
cctacccactatccagggcg

SEQ ID NO: 24781 - DNA, 20 bp, Artificial Sequence
  Description of Artificial Sequence: Synthetic oligonucleotide
  Target: COL7A1; (-) strand; PAM type: YTN; PAM sequence: CTC
ccaccccatggtgttcccta

SEQ ID NO: 24782 - DNA, 20 bp, Artificial Sequence
  Description of Artificial Sequence: Synthetic oligonucleotide
  Target: COL7A1; (-) strand; PAM type: YTN; PAM sequence: CTC
cagaggtgactcccacccca

SEQ ID NO: 24783 - DNA, 20 bp, Artificial Sequence
  Description of Artificial Sequence: Synthetic oligonucleotide
  Target: COL7A1; (-) strand; PAM type: YTN; PAM sequence: CTG
gcctccagaggtgactccca

SEQ ID NO: 24784 - DNA, 20 bp, Artificial Sequence
  Description of Artificial Sequence: Synthetic oligonucleotide
  Target: COL7A1; (-) strand; PAM type: YTN; PAM sequence: CTC
tggcctccagaggtgactcc

SEQ ID NO: 24785 - DNA, 20 bp, Artificial Sequence
  Description of Artificial Sequence: Synthetic oligonucleotide
  Target: COL7A1; (-) strand; PAM type: YTN; PAM sequence: TTG
tccccatggcaagccccagt

SEQ ID NO: 24786 - DNA, 20 bp, Artificial Sequence
  Description of Artificial Sequence: Synthetic oligonucleotide
  Target: COL7A1; (-) strand; PAM type: YTN; PAM sequence: CTT
gtccccatggcaagccccag

SEQ ID NO: 24787 - DNA, 20 bp, Artificial Sequence
  Description of Artificial Sequence: Synthetic oligonucleotide
  Target: COL7A1; (-) strand; PAM type: YTN; PAM sequence: CTA
tggtgacccttgtccccatg

SEQ ID NO: 24788 - DNA, 20 bp, Artificial Sequence
  Description of Artificial Sequence: Synthetic oligonucleotide
  Target: COL7A1; (-) strand; PAM type: YTN; PAM sequence: CTG
cctatggtgacccttgtccc

SEQ ID NO: 24789 - DNA, 20 bp, Artificial Sequence
  Description of Artificial Sequence: Synthetic oligonucleotide
  Target: COL7A1; (-) strand; PAM type: YTN; PAM sequence: CTA
tgatggtgtcccctgcctat

SEQ ID NO: 24790 - DNA, 20 bp, Artificial Sequence
  Description of Artificial Sequence: Synthetic oligonucleotide
  Target: COL7A1; (-) strand; PAM type: YTN; PAM sequence: CTC
cacagtagccgcctatgatg

SEQ ID NO: 24791 - DNA, 20 bp, Artificial Sequence
  Description of Artificial Sequence: Synthetic oligonucleotide
  Target: COL7A1; (-) strand; PAM type: YTN; PAM sequence: CTC
atgtcacccagggtccccca

SEQ ID NO: 24792 - DNA, 20 bp, Artificial Sequence
  Description of Artificial Sequence: Synthetic oligonucleotide
  Target: COL7A1; (-) strand; PAM type: YTN; PAM sequence: CTC
atggtgtcctcatgtcaccc

SEQ ID NO: 24793 - DNA, 20 bp, Artificial Sequence
  Description of Artificial Sequence: Synthetic oligonucleotide
  Target: COL7A1; (-) strand; PAM type: YTN; PAM sequence: CTC
tcatggtgtcctcatgtcac

SEQ ID NO: 24794 - DNA, 20 bp, Artificial Sequence
  Description of Artificial Sequence: Synthetic oligonucleotide
  Target: COL7A1; (-) strand; PAM type: YTN; PAM sequence: TTA
tagtgacccagtgctctcat

SEQ ID NO: 24795 - DNA, 20 bp, Artificial Sequence
  Description of Artificial Sequence: Synthetic oligonucleotide
  Target: COL7A1; (-) strand; PAM type: YTN; PAM sequence: CTT
atagtgacccagtgctctca

SEQ ID NO: 24796 - DNA, 20 bp, Artificial Sequence
  Description of Artificial Sequence: Synthetic oligonucleotide
  Target: COL7A1; (-) strand; PAM type: YTN; PAM sequence: TTG
accttatagtgacccagtgc

SEQ ID NO: 24797 - DNA, 20 bp, Artificial Sequence
  Description of Artificial Sequence: Synthetic oligonucleotide
  Target: COL7A1; (-) strand; PAM type: YTN; PAM sequence: TTT
gaccttatagtgacccagtg

SEQ ID NO: 24798 - DNA, 20 bp, Artificial Sequence
  Description of Artificial Sequence: Synthetic oligonucleotide
  Target: COL7A1; (-) strand; PAM type: YTN; PAM sequence: TTT
tgaccttatagtgacccagt

SEQ ID NO: 24799 - DNA, 20 bp, Artificial Sequence
  Description of Artificial Sequence: Synthetic oligonucleotide
  Target: COL7A1; (-) strand; PAM type: YTN; PAM sequence: CTT
ttgaccttatagtgacccag

SEQ ID NO: 24800 - DNA, 20 bp, Artificial Sequence
  Description of Artificial Sequence: Synthetic oligonucleotide
  Target: COL7A1; (-) strand; PAM type: YTN; PAM sequence: CTG
tccccagagggcccccgtca

SEQ ID NO: 24801 - DNA, 20 bp, Artificial Sequence
  Description of Artificial Sequence: Synthetic oligonucleotide
  Target: COL7A1; (-) strand; PAM type: YTN; PAM sequence: CTC
ccacaggggccccctgtccc

SEQ ID NO: 24802 - DNA, 20 bp, Artificial Sequence
  Description of Artificial Sequence: Synthetic oligonucleotide
  Target: COL7A1; (-) strand; PAM type: YTN; PAM sequence: CTG
ctcccacaggggccccctgt

SEQ ID NO: 24803 - DNA, 20 bp, Artificial Sequence
  Description of Artificial Sequence: Synthetic oligonucleotide
  Target: COL7A1; (-) strand; PAM type: YTN; PAM sequence: CTG
gtgacccggtaagatgcccc

SEQ ID NO: 24804 - DNA, 20 bp, Artificial Sequence
  Description of Artificial Sequence: Synthetic oligonucleotide
  Target: COL7A1; (-) strand; PAM type: YTN; PAM sequence: CTG
gtgcagcagggatccctggt

SEQ ID NO: 24805 - DNA, 20 bp, Artificial Sequence
  Description of Artificial Sequence: Synthetic oligonucleotide
  Target: COL7A1; (-) strand; PAM type: YTN; PAM sequence: CTC
acagggtcaacctggtgcag

SEQ ID NO: 24806 - DNA, 20 bp, Artificial Sequence
  Description of Artificial Sequence: Synthetic oligonucleotide
  Target: COL7A1; (-) strand; PAM type: YTN; PAM sequence: TTC
tcacagggtcaacctggtgc

SEQ ID NO: 24807 - DNA, 20 bp, Artificial Sequence
  Description of Artificial Sequence: Synthetic oligonucleotide
  Target: COL7A1; (-) strand; PAM type: YTN; PAM sequence: TTT
ctcacagggtcaacctggtg

SEQ ID NO: 24808 - DNA, 20 bp, Artificial Sequence
  Description of Artificial Sequence: Synthetic oligonucleotide
  Target: COL7A1; (-) strand; PAM type: YTN; PAM sequence: CTG
tgtttctcacagggtcaacc

SEQ ID NO: 24809 - DNA, 20 bp, Artificial Sequence
  Description of Artificial Sequence: Synthetic oligonucleotide
  Target: COL7A1; (-) strand; PAM type: YTN; PAM sequence: CTC
ccccatctgtgtttctcaca

SEQ ID NO: 24810 - DNA, 20 bp, Artificial Sequence
  Description of Artificial Sequence: Synthetic oligonucleotide
  Target: COL7A1; (-) strand; PAM type: YTN; PAM sequence: CTG
aagggctcccccatctgtgt

SEQ ID NO: 24811 - DNA, 20 bp, Artificial Sequence
  Description of Artificial Sequence: Synthetic oligonucleotide
  Target: COL7A1; (-) strand; PAM type: YTN; PAM sequence: TTG
gggacagtcccactgaaggg

SEQ ID NO: 24812 - DNA, 20 bp, Artificial Sequence
  Description of Artificial Sequence: Synthetic oligonucleotide
  Target: COL7A1; (-) strand; PAM type: YTN; PAM sequence: CTG
agtggccacacatgcagcgg

SEQ ID NO: 24813 - DNA, 20 bp, Artificial Sequence
  Description of Artificial Sequence: Synthetic oligonucleotide
  Target: COL7A1; (-) strand; PAM type: YTN; PAM sequence: CTG
agcatctgagtggccacaca

SEQ ID NO: 24814 - DNA, 20 bp, Artificial Sequence
  Description of Artificial Sequence: Synthetic oligonucleotide
  Target: COL7A1; (-) strand; PAM type: YTN; PAM sequence: CTG
gccgctgagcatctgagtgg

SEQ ID NO: 24815 - DNA, 20 bp, Artificial Sequence
  Description of Artificial Sequence: Synthetic oligonucleotide
  Target: COL7A1; (-) strand; PAM type: YTN; PAM sequence: CTG
ggccctggccgctgagcatc

SEQ ID NO: 24816 - DNA, 20 bp, Artificial Sequence
  Description of Artificial Sequence: Synthetic oligonucleotide
  Target: COL7A1; (-) strand; PAM type: YTN; PAM sequence: CTG
tgtgtggcctgggccctggc

SEQ ID NO: 24817 - DNA, 20 bp, Artificial Sequence
  Description of Artificial Sequence: Synthetic oligonucleotide
  Target: COL7A1; (-) strand; PAM type: YTN; PAM sequence: TTC
acccgggatctgtgtgtggc

SEQ ID NO: 24818 - DNA, 20 bp, Artificial Sequence
  Description of Artificial Sequence: Synthetic oligonucleotide
  Target: COL7A1; (-) strand; PAM type: YTN; PAM sequence: CTG
ccggccccatgtgtgttcac

SEQ ID NO: 24819 - DNA, 20 bp, Artificial Sequence
  Description of Artificial Sequence: Synthetic oligonucleotide
  Target: COL7A1; (-) strand; PAM type: YTN; PAM sequence: TTG
ctgccggccccatgtgtgtt

SEQ ID NO: 24820 - DNA, 20 bp, Artificial Sequence
  Description of Artificial Sequence: Synthetic oligonucleotide
  Target: COL7A1; (-) strand; PAM type: YTN; PAM sequence: CTT
gctgccggccccatgtgtgt

SEQ ID NO: 24821 - DNA, 20 bp, Artificial Sequence
  Description of Artificial Sequence: Synthetic oligonucleotide
  Target: COL7A1; (-) strand; PAM type: YTN; PAM sequence: CTC
ccttgctgccggccccatgt

SEQ ID NO: 24822 - DNA, 20 bp, Artificial Sequence
  Description of Artificial Sequence: Synthetic oligonucleotide
  Target: COL7A1; (-) strand; PAM type: YTN; PAM sequence: CTG
gctcccttgctgccggcccc

SEQ ID NO: 24823 - DNA, 20 bp, Artificial Sequence
  Description of Artificial Sequence: Synthetic oligonucleotide
  Target: COL7A1; (-) strand; PAM type: YTN; PAM sequence: TTC
tggctcccttgctgccggcc

SEQ ID NO: 24824 - DNA, 20 bp, Artificial Sequence
  Description of Artificial Sequence: Synthetic oligonucleotide
  Target: COL7A1; (-) strand; PAM type: YTN; PAM sequence: CTG
ggggttctggctcccttgct

SEQ ID NO: 24825 - DNA, 20 bp, Artificial Sequence
  Description of Artificial Sequence: Synthetic oligonucleotide
  Target: COL7A1; (-) strand; PAM type: YTN; PAM sequence: TTA
agtgctgggggttctggctc

SEQ ID NO: 24826 - DNA, 20 bp, Artificial Sequence
  Description of Artificial Sequence: Synthetic oligonucleotide
  Target: COL7A1; (-) strand; PAM type: YTN; PAM sequence: CTT
aagtgctgggggttctggct

SEQ ID NO: 24827 - DNA, 20 bp, Artificial Sequence
  Description of Artificial Sequence: Synthetic oligonucleotide
  Target: COL7A1; (-) strand; PAM type: YTN; PAM sequence: CTC
ttaagtgctgggggttctgg

SEQ ID NO: 24828 - DNA, 20 bp, Artificial Sequence
  Description of Artificial Sequence: Synthetic oligonucleotide
  Target: COL7A1; (-) strand; PAM type: YTN; PAM sequence: CTG
ggggtcctcttaagtgctgg

SEQ ID NO: 24829 - DNA, 20 bp, Artificial Sequence
  Description of Artificial Sequence: Synthetic oligonucleotide
  Target: COL7A1; (-) strand; PAM type: YTN; PAM sequence: CTG
ccccaggcccaggcccaggc

SEQ ID NO: 24830 - DNA, 20 bp, Artificial Sequence
  Description of Artificial Sequence: Synthetic oligonucleotide
  Target: COL7A1; (-) strand; PAM type: YTN; PAM sequence: TTC
tgccccaggcccaggcccag

SEQ ID NO: 24831 - DNA, 20 bp, Artificial Sequence
  Description of Artificial Sequence: Synthetic oligonucleotide
  Target: COL7A1; (-) strand; PAM type: YTN; PAM sequence: CTG
ggaccccaggcaagttctgc

SEQ ID NO: 24832 - DNA, 20 bp, Artificial Sequence
  Description of Artificial Sequence: Synthetic oligonucleotide
  Target: COL7A1; (-) strand; PAM type: YTN; PAM sequence: CTC
ctgggaccccaggcaagttc

SEQ ID NO: 24833 - DNA, 20 bp, Artificial Sequence
  Description of Artificial Sequence: Synthetic oligonucleotide
  Target: COL7A1; (-) strand; PAM type: YTN; PAM sequence: CTG
cgtggactcctgggacccca

SEQ ID NO: 24834 - DNA, 20 bp, Artificial Sequence
  Description of Artificial Sequence: Synthetic oligonucleotide
  Target: COL7A1; (-) strand; PAM type: YTN; PAM sequence: TTG
ccaggactgcgtggactcct

SEQ ID NO: 24835 - DNA, 20 bp, Artificial Sequence
  Description of Artificial Sequence: Synthetic oligonucleotide
  Target: COL7A1; (-) strand; PAM type: YTN; PAM sequence: CTC
agccgggttgccaggactgc

SEQ ID NO: 24836 - DNA, 20 bp, Artificial Sequence
  Description of Artificial Sequence: Synthetic oligonucleotide
  Target: COL7A1; (-) strand; PAM type: YTN; PAM sequence: CTG
gtgacaagggctcagccggg

SEQ ID NO: 24837 - DNA, 20 bp, Artificial Sequence
  Description of Artificial Sequence: Synthetic oligonucleotide
  Target: COL7A1; (-) strand; PAM type: YTN; PAM sequence: CTC
ccacagggcagcaagggaga

SEQ ID NO: 24838 - DNA, 20 bp, Artificial Sequence
  Description of Artificial Sequence: Synthetic oligonucleotide
  Target: COL7A1; (-) strand; PAM type: YTN; PAM sequence: CTG
gtcactcccacagggcagca

SEQ ID NO: 24839 - DNA, 20 bp, Artificial Sequence
  Description of Artificial Sequence: Synthetic oligonucleotide
  Target: COL7A1; (-) strand; PAM type: YTN; PAM sequence: CTC
ctggtcactcccacagggca

SEQ ID NO: 24840 - DNA, 20 bp, Artificial Sequence
  Description of Artificial Sequence: Synthetic oligonucleotide
  Target: COL7A1; (-) strand; PAM type: YTN; PAM sequence: CTC
tcctggtcactcccacaggg

SEQ ID NO: 24841 - DNA, 20 bp, Artificial Sequence
  Description of Artificial Sequence: Synthetic oligonucleotide
  Target: COL7A1; (-) strand; PAM type: YTN; PAM sequence: CTG
aatccctctcctggtcactc

SEQ ID NO: 24842 - DNA, 20 bp, Artificial Sequence
  Description of Artificial Sequence: Synthetic oligonucleotide
  Target: COL7A1; (-) strand; PAM type: YTN; PAM sequence: CTG
actgaatccctctcctggtc

SEQ ID NO: 24843 - DNA, 20 bp, Artificial Sequence
  Description of Artificial Sequence: Synthetic oligonucleotide
  Target: COL7A1; (-) strand; PAM type: YTN; PAM sequence: CTG
gtcctgactgaatccctctc

SEQ ID NO: 24844 - DNA, 20 bp, Artificial Sequence
  Description of Artificial Sequence: Synthetic oligonucleotide
  Target: COL7A1; (-) strand; PAM type: YTN; PAM sequence: CTG
atctggtcctgactgaatcc

SEQ ID NO: 24845 - DNA, 20 bp, Artificial Sequence
  Description of Artificial Sequence: Synthetic oligonucleotide
  Target: COL7A1; (-) strand; PAM type: YTN; PAM sequence: CTA
agcccccagcctgatctggt

SEQ ID NO: 24846 - DNA, 20 bp, Artificial Sequence
  Description of Artificial Sequence: Synthetic oligonucleotide
  Target: COL7A1; (-) strand; PAM type: YTN; PAM sequence: TTC
taagcccccagcctgatctg

SEQ ID NO: 24847 - DNA, 20 bp, Artificial Sequence
  Description of Artificial Sequence: Synthetic oligonucleotide
  Target: COL7A1; (-) strand; PAM type: YTN; PAM sequence: TTG
tattctaagcccccagcctg

SEQ ID NO: 24848 - DNA, 20 bp, Artificial Sequence
  Description of Artificial Sequence: Synthetic oligonucleotide
  Target: COL7A1; (-) strand; PAM type: YTN; PAM sequence: CTC
gttgtattctaagcccccag

SEQ ID NO: 24849 - DNA, 20 bp, Artificial Sequence
  Description of Artificial Sequence: Synthetic oligonucleotide
  Target: COL7A1; (-) strand; PAM type: YTN; PAM sequence: CTG
gcgggctcgttgtattctaa

SEQ ID NO: 24850 - DNA, 20 bp, Artificial Sequence
  Description of Artificial Sequence: Synthetic oligonucleotide
  Target: COL7A1; (-) strand; PAM type: YTN; PAM sequence: CTG
ccccagctggcgggctcgtt

SEQ ID NO: 24851 - DNA, 20 bp, Artificial Sequence
  Description of Artificial Sequence: Synthetic oligonucleotide
  Target: COL7A1; (-) strand; PAM type: YTN; PAM sequence: CTC
tgccccagctggcgggctcg

SEQ ID NO: 24852 - DNA, 20 bp, Artificial Sequence
  Description of Artificial Sequence: Synthetic oligonucleotide
  Target: COL7A1; (-) strand; PAM type: YTN; PAM sequence: TTG
agctctgccccagctggcgg

SEQ ID NO: 24853 - DNA, 20 bp, Artificial Sequence
  Description of Artificial Sequence: Synthetic oligonucleotide
  Target: COL7A1; (-) strand; PAM type: YTN; PAM sequence: CTT
gagctctgccccagctggcg

SEQ ID NO: 24854 - DNA, 20 bp, Artificial Sequence
  Description of Artificial Sequence: Synthetic oligonucleotide
  Target: COL7A1; (-) strand; PAM type: YTN; PAM sequence: TTC
gggagtgacttgagctctgc

SEQ ID NO: 24855 - DNA, 20 bp, Artificial Sequence
  Description of Artificial Sequence: Synthetic oligonucleotide
  Target: COL7A1; (-) strand; PAM type: YTN; PAM sequence: CTA
gggccgttcgggagtgactt

SEQ ID NO: 24856 - DNA, 20 bp, Artificial Sequence
  Description of Artificial Sequence: Synthetic oligonucleotide
  Target: COL7A1; (-) strand; PAM type: YTN; PAM sequence: CTG
ctagggccgttcgggagtga

SEQ ID NO: 24857 - DNA, 20 bp, Artificial Sequence
  Description of Artificial Sequence: Synthetic oligonucleotide
  Target: COL7A1; (-) strand; PAM type: YTN; PAM sequence: CTG
ggaggacgtgctgctagggc

SEQ ID NO: 24858 - DNA, 20 bp, Artificial Sequence
  Description of Artificial Sequence: Synthetic oligonucleotide
  Target: COL7A1; (-) strand; PAM type: YTN; PAM sequence: CTA
tggcacaggctgggaggacg

SEQ ID NO: 24859 - DNA, 20 bp, Artificial Sequence
  Description of Artificial Sequence: Synthetic oligonucleotide
  Target: COL7A1; (-) strand; PAM type: YTN; PAM sequence: TTC
cacccgctatggcacaggct

SEQ ID NO: 24860 - DNA, 20 bp, Artificial Sequence
  Description of Artificial Sequence: Synthetic oligonucleotide
  Target: COL7A1; (-) strand; PAM type: YTN; PAM sequence: CTA
cagcccccagttccacccgc

SEQ ID NO: 24861 - DNA, 20 bp, Artificial Sequence
  Description of Artificial Sequence: Synthetic oligonucleotide
  Target: COL7A1; (-) strand; PAM type: YTN; PAM sequence: CTG
tggactacagcccccagttc

SEQ ID NO: 24862 - DNA, 20 bp, Artificial Sequence
  Description of Artificial Sequence: Synthetic oligonucleotide
  Target: COL7A1; (-) strand; PAM type: YTN; PAM sequence: TTG
gggtgagaaatgagccagtc

SEQ ID NO: 24863 - DNA, 20 bp, Artificial Sequence
  Description of Artificial Sequence: Synthetic oligonucleotide
  Target: COL7A1; (-) strand; PAM type: YTN; PAM sequence: CTT
ggggtgagaaatgagccagt

SEQ ID NO: 24864 - DNA, 20 bp, Artificial Sequence
  Description of Artificial Sequence: Synthetic oligonucleotide
  Target: COL7A1; (-) strand; PAM type: YTN; PAM sequence: CTG
gagtccttggggtgagaaat

SEQ ID NO: 24865 - DNA, 20 bp, Artificial Sequence
  Description of Artificial Sequence: Synthetic oligonucleotide
  Target: COL7A1; (-) strand; PAM type: YTN; PAM sequence: TTC
agatgggatgaggaacccag

SEQ ID NO: 24866 - DNA, 20 bp, Artificial Sequence
  Description of Artificial Sequence: Synthetic oligonucleotide
  Target: COL7A1; (-) strand; PAM type: YTN; PAM sequence: CTT
cagatgggatgaggaaccca

SEQ ID NO: 24867 - DNA, 20 bp, Artificial Sequence
  Description of Artificial Sequence: Synthetic oligonucleotide
  Target: COL7A1; (-) strand; PAM type: YTN; PAM sequence: CTG
aaggtgcttcagatgggatg

SEQ ID NO: 24868 - DNA, 20 bp, Artificial Sequence
  Description of Artificial Sequence: Synthetic oligonucleotide
  Target: COL7A1; (-) strand; PAM type: YTN; PAM sequence: TTG
ggtgtccccatctgaaggtg

SEQ ID NO: 24869 - DNA, 20 bp, Artificial Sequence
  Description of Artificial Sequence: Synthetic oligonucleotide
  Target: COL7A1; (-) strand; PAM type: YTN; PAM sequence: CTT
gggtgtccccatctgaaggt

SEQ ID NO: 24870 - DNA, 20 bp, Artificial Sequence
  Description of Artificial Sequence: Synthetic oligonucleotide
  Target: COL7A1; (-) strand; PAM type: YTN; PAM sequence: CTC
cttgggtgtccccatctgaa

SEQ ID NO: 24871 - DNA, 20 bp, Artificial Sequence
  Description of Artificial Sequence: Synthetic oligonucleotide
  Target: COL7A1; (-) strand; PAM type: YTN; PAM sequence: CTA
tagggacaggaaaggggctc

SEQ ID NO: 24872 - DNA, 20 bp, Artificial Sequence
  Description of Artificial Sequence: Synthetic oligonucleotide
  Target: COL7A1; (-) strand; PAM type: YTN; PAM sequence: CTA
tgaaggggccctatagggac

SEQ ID NO: 24873 - DNA, 20 bp, Artificial Sequence
  Description of Artificial Sequence: Synthetic oligonucleotide
  Target: COL7A1; (-) strand; PAM type: YTN; PAM sequence: CTG
gccctatgaaggggccctat

SEQ ID NO: 24874 - DNA, 20 bp, Artificial Sequence
  Description of Artificial Sequence: Synthetic oligonucleotide
  Target: COL7A1; (-) strand; PAM type: YTN; PAM sequence: CTG
tggactggccctatgaaggg

SEQ ID NO: 24875 - DNA, 20 bp, Artificial Sequence
  Description of Artificial Sequence: Synthetic oligonucleotide
  Target: COL7A1; (-) strand; PAM type: YTN; PAM sequence: CTC
tgtggactggccctatgaag

SEQ ID NO: 24876 - DNA, 20 bp, Artificial Sequence
  Description of Artificial Sequence: Synthetic oligonucleotide
  Target: COL7A1; (-) strand; PAM type: YTN; PAM sequence: TTA
ggagagctctgtggactggc

SEQ ID NO: 24877 - DNA, 20 bp, Artificial Sequence
  Description of Artificial Sequence: Synthetic oligonucleotide
  Target: COL7A1; (-) strand; PAM type: YTN; PAM sequence: TTG
gtgtgaggttaggagagctc

SEQ ID NO: 24878 - DNA, 20 bp, Artificial Sequence
  Description of Artificial Sequence: Synthetic oligonucleotide
  Target: COL7A1; (-) strand; PAM type: YTN; PAM sequence: CTT
ggtgtgaggttaggagagct

SEQ ID NO: 24879 - DNA, 20 bp, Artificial Sequence
  Description of Artificial Sequence: Synthetic oligonucleotide
  Target: COL7A1; (-) strand; PAM type: YTN; PAM sequence: CTC
aaggccttggtgtgaggtta

SEQ ID NO: 24880 - DNA, 20 bp, Artificial Sequence
  Description of Artificial Sequence: Synthetic oligonucleotide
  Target: COL7A1; (-) strand; PAM type: YTN; PAM sequence: CTA
gggagggctcaaggccttgg

SEQ ID NO: 24881 - DNA, 20 bp, Artificial Sequence
  Description of Artificial Sequence: Synthetic oligonucleotide
  Target: COL7A1; (-) strand; PAM type: YTN; PAM sequence: CTC
tagggagggctcaaggcctt

SEQ ID NO: 24882 - DNA, 20 bp, Artificial Sequence
  Description of Artificial Sequence: Synthetic oligonucleotide
  Target: COL7A1; (-) strand; PAM type: YTN; PAM sequence: CTA
tggagtggccgagaggaggg

SEQ ID NO: 24883 - DNA, 20 bp, Artificial Sequence
  Description of Artificial Sequence: Synthetic oligonucleotide
  Target: COL7A1; (-) strand; PAM type: YTN; PAM sequence: CTG
actatggagtggccgagagg

SEQ ID NO: 24884 - DNA, 20 bp, Artificial Sequence
  Description of Artificial Sequence: Synthetic oligonucleotide
  Target: COL7A1; (-) strand; PAM type: YTN; PAM sequence: CTG
tggctgactatggagtggcc

SEQ ID NO: 24885 - DNA, 20 bp, Artificial Sequence
  Description of Artificial Sequence: Synthetic oligonucleotide
  Target: COL7A1; (-) strand; PAM type: YTN; PAM sequence: TTC
tgtggctgactatggagtgg

SEQ ID NO: 24886 - DNA, 20 bp, Artificial Sequence
  Description of Artificial Sequence: Synthetic oligonucleotide
  Target: COL7A1; (-) strand; PAM type: YTN; PAM sequence: TTA
gggggaaggggttctgtggc

SEQ ID NO: 24887 - DNA, 20 bp, Artificial Sequence
  Description of Artificial Sequence: Synthetic oligonucleotide
  Target: COL7A1; (-) strand; PAM type: YTN; PAM sequence: TTT
agggggaaggggttctgtgg

SEQ ID NO: 24888 - DNA, 20 bp, Artificial Sequence
  Description of Artificial Sequence: Synthetic oligonucleotide
  Target: COL7A1; (-) strand; PAM type: YTN; PAM sequence: CTG
gggtttagggggaaggggtt

SEQ ID NO: 24889 - DNA, 20 bp, Artificial Sequence
  Description of Artificial Sequence: Synthetic oligonucleotide
  Target: COL7A1; (-) strand; PAM type: YTN; PAM sequence: TTC
tggggtttagggggaagggg

SEQ ID NO: 24890 - DNA, 20 bp, Artificial Sequence
  Description of Artificial Sequence: Synthetic oligonucleotide
  Target: COL7A1; (-) strand; PAM type: YTN; PAM sequence: TTT
ctggggtttagggggaaggg

SEQ ID NO: 24891 - DNA, 20 bp, Artificial Sequence
  Description of Artificial Sequence: Synthetic oligonucleotide
  Target: COL7A1; (-) strand; PAM type: YTN; PAM sequence: CTT
tctggggtttagggggaagg

SEQ ID NO: 24892 - DNA, 20 bp, Artificial Sequence
  Description of Artificial Sequence: Synthetic oligonucleotide
  Target: COL7A1; (-) strand; PAM type: YTN; PAM sequence: CTG
tgagggcaggaggggaggac

SEQ ID NO: 24893 - DNA, 20 bp, Artificial Sequence
  Description of Artificial Sequence: Synthetic oligonucleotide
  Target: COL7A1; (-) strand; PAM type: YTN; PAM sequence: TTC
cacagcatctgtgagggcag

SEQ ID NO: 24894 - DNA, 20 bp, Artificial Sequence
  Description of Artificial Sequence: Synthetic oligonucleotide
  Target: COL7A1; (-) strand; PAM type: YTN; PAM sequence: CTG
tggtggttccacagcatctg

SEQ ID NO: 24895 - DNA, 20 bp, Artificial Sequence
  Description of Artificial Sequence: Synthetic oligonucleotide
  Target: COL7A1; (-) strand; PAM type: YTN; PAM sequence: CTG
tggctgtggtggttccacag

SEQ ID NO: 24896 - DNA, 20 bp, Artificial Sequence
  Description of Artificial Sequence: Synthetic oligonucleotide
  Target: COL7A1; (-) strand; PAM type: YTN; PAM sequence: CTG
tggggtcctgtggctgtggt

SEQ ID NO: 24897 - DNA, 20 bp, Artificial Sequence
  Description of Artificial Sequence: Synthetic oligonucleotide
  Target: COL7A1; (-) strand; PAM type: YTN; PAM sequence: CTC
tgtggggtcctgtggctgtg

SEQ ID NO: 24898 - DNA, 20 bp, Artificial Sequence
  Description of Artificial Sequence: Synthetic oligonucleotide
  Target: COL7A1; (-) strand; PAM type: YTN; PAM sequence: CTC
tctgtggggtcctgtggctg

SEQ ID NO: 24899 - DNA, 20 bp, Artificial Sequence
  Description of Artificial Sequence: Synthetic oligonucleotide
  Target: COL7A1; (-) strand; PAM type: YTN; PAM sequence: CTG
gtgacaaggtacagggaaga

SEQ ID NO: 24900 - DNA, 20 bp, Artificial Sequence
  Description of Artificial Sequence: Synthetic oligonucleotide
  Target: COL7A1; (-) strand; PAM type: YTN; PAM sequence: CTC
ggggagacaatggggaccct

SEQ ID NO: 24901 - DNA, 20 bp, Artificial Sequence
  Description of Artificial Sequence: Synthetic oligonucleotide
  Target: COL7A1; (-) strand; PAM type: YTN; PAM sequence: TTG
gatggtgacaaaggacctcg

SEQ ID NO: 24902 - DNA, 20 bp, Artificial Sequence
  Description of Artificial Sequence: Synthetic oligonucleotide
  Target: COL7A1; (-) strand; PAM type: YTN; PAM sequence: CTT
ggatggtgacaaaggacctc

SEQ ID NO: 24903 - DNA, 20 bp, Artificial Sequence
  Description of Artificial Sequence: Synthetic oligonucleotide
  Target: COL7A1; (-) strand; PAM type: YTN; PAM sequence: CTC
ggggcttggatggtgacaaa

SEQ ID NO: 24904 - DNA, 20 bp, Artificial Sequence
  Description of Artificial Sequence: Synthetic oligonucleotide
  Target: COL7A1; (-) strand; PAM type: YTN; PAM sequence: TTA
cccaaaccaacccagggtga

SEQ ID NO: 24905 - DNA, 20 bp, Artificial Sequence
  Description of Artificial Sequence: Synthetic oligonucleotide
  Target: COL7A1; (-) strand; PAM type: YTN; PAM sequence: CTT
acccaaaccaacccagggtg

SEQ ID NO: 24906 - DNA, 20 bp, Artificial Sequence
  Description of Artificial Sequence: Synthetic oligonucleotide
  Target: COL7A1; (-) strand; PAM type: YTN; PAM sequence: TTC
ttacccaaaccaacccaggg

SEQ ID NO: 24907 - DNA, 20 bp, Artificial Sequence
  Description of Artificial Sequence: Synthetic oligonucleotide
  Target: COL7A1; (-) strand; PAM type: YTN; PAM sequence: CTT
cttacccaaaccaacccagg

SEQ ID NO: 24908 - DNA, 20 bp, Artificial Sequence
  Description of Artificial Sequence: Synthetic oligonucleotide
  Target: COL7A1; (-) strand; PAM type: YTN; PAM sequence: TTA
ccgtgacttcttacccaaac

SEQ ID NO: 24909 - DNA, 20 bp, Artificial Sequence
  Description of Artificial Sequence: Synthetic oligonucleotide
  Target: COL7A1; (-) strand; PAM type: YTN; PAM sequence: CTT
accgtgacttcttacccaaa

SEQ ID NO: 24910 - DNA, 20 bp, Artificial Sequence
  Description of Artificial Sequence: Synthetic oligonucleotide
  Target: COL7A1; (-) strand; PAM type: YTN; PAM sequence: TTC
agccccttaccgtgacttct

SEQ ID NO: 24911 - DNA, 20 bp, Artificial Sequence
  Description of Artificial Sequence: Synthetic oligonucleotide
  Target: COL7A1; (-) strand; PAM type: YTN; PAM sequence: CTT
cagccccttaccgtgacttc

SEQ ID NO: 24912 - DNA, 20 bp, Artificial Sequence
  Description of Artificial Sequence: Synthetic oligonucleotide
  Target: COL7A1; (-) strand; PAM type: YTN; PAM sequence: CTC
ccagagggtgagggaccttc

SEQ ID NO: 24913 - DNA, 20 bp, Artificial Sequence
  Description of Artificial Sequence: Synthetic oligonucleotide
  Target: COL7A1; (-) strand; PAM type: YTN; PAM sequence: CTC
aaactcccagagggtgaggg

SEQ ID NO: 24914 - DNA, 20 bp, Artificial Sequence
  Description of Artificial Sequence: Synthetic oligonucleotide
  Target: COL7A1; (-) strand; PAM type: YTN; PAM sequence: CTG
agagctcaaactcccagagg

SEQ ID NO: 24915 - DNA, 20 bp, Artificial Sequence
  Description of Artificial Sequence: Synthetic oligonucleotide
  Target: COL7A1; (-) strand; PAM type: YTN; PAM sequence: CTG
gcccagggcatctgagagct

SEQ ID NO: 24916 - DNA, 20 bp, Artificial Sequence
  Description of Artificial Sequence: Synthetic oligonucleotide
  Target: COL7A1; (-) strand; PAM type: YTN; PAM sequence: CTG
ggtgcgagagggaccccgtg

SEQ ID NO: 24917 - DNA, 20 bp, Artificial Sequence
  Description of Artificial Sequence: Synthetic oligonucleotide
  Target: COL7A1; (-) strand; PAM type: YTN; PAM sequence: CTC
ccctgggtgcgagagggacc

SEQ ID NO: 24918 - DNA, 20 bp, Artificial Sequence
  Description of Artificial Sequence: Synthetic oligonucleotide
  Target: COL7A1; (-) strand; PAM type: YTN; PAM sequence: CTG
ggtctcccctgggtgcgaga

SEQ ID NO: 24919 - DNA, 20 bp, Artificial Sequence
  Description of Artificial Sequence: Synthetic oligonucleotide
  Target: COL7A1; (-) strand; PAM type: YTN; PAM sequence: CTC
caggcccacggggtgccaag

SEQ ID NO: 24920 - DNA, 20 bp, Artificial Sequence
  Description of Artificial Sequence: Synthetic oligonucleotide
  Target: COL7A1; (-) strand; PAM type: YTN; PAM sequence: CTG
gggcctccaggcccacgggg

SEQ ID NO: 24921 - DNA, 20 bp, Artificial Sequence
  Description of Artificial Sequence: Synthetic oligonucleotide
  Target: COL7A1; (-) strand; PAM type: YTN; PAM sequence: CTG
tgatcctggggcctccaggc

SEQ ID NO: 24922 - DNA, 20 bp, Artificial Sequence
  Description of Artificial Sequence: Synthetic oligonucleotide
  Target: COL7A1; (-) strand; PAM type: YTN; PAM sequence: CTC
agctgtgatcctggggcctc

SEQ ID NO: 24923 - DNA, 20 bp, Artificial Sequence
  Description of Artificial Sequence: Synthetic oligonucleotide
  Target: COL7A1; (-) strand; PAM type: YTN; PAM sequence: CTC
agggagactcagctgtgatc

SEQ ID NO: 24924 - DNA, 20 bp, Artificial Sequence
  Description of Artificial Sequence: Synthetic oligonucleotide
  Target: COL7A1; (-) strand; PAM type: YTN; PAM sequence: CTG
ccccctcagggagactcagc

SEQ ID NO: 24925 - DNA, 20 bp, Artificial Sequence
  Description of Artificial Sequence: Synthetic oligonucleotide
  Target: COL7A1; (-) strand; PAM type: YTN; PAM sequence: CTG
cctgccccctcagggagact

SEQ ID NO: 24926 - DNA, 20 bp, Artificial Sequence
  Description of Artificial Sequence: Synthetic oligonucleotide
  Target: COL7A1; (-) strand; PAM type: YTN; PAM sequence: TTC
ctgcctgccccctcagggag

SEQ ID NO: 24927 - DNA, 20 bp, Artificial Sequence
  Description of Artificial Sequence: Synthetic oligonucleotide
  Target: COL7A1; (-) strand; PAM type: YTN; PAM sequence: CTG
attcctgcctgccccctcag

SEQ ID NO: 24928 - DNA, 20 bp, Artificial Sequence
  Description of Artificial Sequence: Synthetic oligonucleotide
  Target: COL7A1; (-) strand; PAM type: YTN; PAM sequence: CTC
tgattcctgcctgccccctc

SEQ ID NO: 24929 - DNA, 20 bp, Artificial Sequence
  Description of Artificial Sequence: Synthetic oligonucleotide
  Target: COL7A1; (-) strand; PAM type: YTN; PAM sequence: CTC
ctctgattcctgcctgcccc

SEQ ID NO: 24930 - DNA, 20 bp, Artificial Sequence
  Description of Artificial Sequence: Synthetic oligonucleotide
  Target: COL7A1; (-) strand; PAM type: YTN; PAM sequence: CTC
ccgactcctctgattcctgc

SEQ ID NO: 24931 - DNA, 20 bp, Artificial Sequence
  Description of Artificial Sequence: Synthetic oligonucleotide
  Target: COL7A1; (-) strand; PAM type: YTN; PAM sequence: CTA
aagggtgacaaggtgagtgt

SEQ ID NO: 24932 - DNA, 20 bp, Artificial Sequence
  Description of Artificial Sequence: Synthetic oligonucleotide
  Target: COL7A1; (-) strand; PAM type: YTN; PAM sequence: TTG
ggagtgcaggactaaagggt

SEQ ID NO: 24933 - DNA, 20 bp, Artificial Sequence
  Description of Artificial Sequence: Synthetic oligonucleotide
  Target: COL7A1; (-) strand; PAM type: YTN; PAM sequence: TTG
cccaatagggtgatgttggg

SEQ ID NO: 24934 - DNA, 20 bp, Artificial Sequence
  Description of Artificial Sequence: Synthetic oligonucleotide
  Target: COL7A1; (-) strand; PAM type: YTN; PAM sequence: TTT
gcccaatagggtgatgttgg

SEQ ID NO: 24935 - DNA, 20 bp, Artificial Sequence
  Description of Artificial Sequence: Synthetic oligonucleotide
  Target: COL7A1; (-) strand; PAM type: YTN; PAM sequence: TTT
tgcccaatagggtgatgttg

SEQ ID NO: 24936 - DNA, 20 bp, Artificial Sequence
  Description of Artificial Sequence: Synthetic oligonucleotide
  Target: COL7A1; (-) strand; PAM type: YTN; PAM sequence: CTT
ttgcccaatagggtgatgtt

SEQ ID NO: 24937 - DNA, 20 bp, Artificial Sequence
  Description of Artificial Sequence: Synthetic oligonucleotide
  Target: COL7A1; (-) strand; PAM type: YTN; PAM sequence: CTC
ttttgcccaatagggtgatg

SEQ ID NO: 24938 - DNA, 20 bp, Artificial Sequence
  Description of Artificial Sequence: Synthetic oligonucleotide
  Target: COL7A1; (-) strand; PAM type: YTN; PAM sequence: CTC
acactcttttgcccaatagg

SEQ ID NO: 24939 - DNA, 20 bp, Artificial Sequence
  Description of Artificial Sequence: Synthetic oligonucleotide
  Target: COL7A1; (-) strand; PAM type: YTN; PAM sequence: TTG
ggcgggactcacactctttt

SEQ ID NO: 24940 - DNA, 20 bp, Artificial Sequence
  Description of Artificial Sequence: Synthetic oligonucleotide
  Target: COL7A1; (-) strand; PAM type: YTN; PAM sequence: TTT
gggcgggactcacactcttt

SEQ ID NO: 24941 - DNA, 20 bp, Artificial Sequence
  Description of Artificial Sequence: Synthetic oligonucleotide
  Target: COL7A1; (-) strand; PAM type: YTN; PAM sequence: CTC
cccagtttgggcgggactca

SEQ ID NO: 24942 - DNA, 20 bp, Artificial Sequence
  Description of Artificial Sequence: Synthetic oligonucleotide
  Target: COL7A1; (-) strand; PAM type: YTN; PAM sequence: TTC
aggtgcggggcctccccagt

SEQ ID NO: 24943 - DNA, 20 bp, Artificial Sequence
  Description of Artificial Sequence: Synthetic oligonucleotide
  Target: COL7A1; (-) strand; PAM type: YTN; PAM sequence: TTA
gaattcaggtgcggggcctc

SEQ ID NO: 24944 - DNA, 20 bp, Artificial Sequence
  Description of Artificial Sequence: Synthetic oligonucleotide
  Target: COL7A1; (-) strand; PAM type: YTN; PAM sequence: TTG
tatgatattagaattcaggt

SEQ ID NO: 24945 - DNA, 20 bp, Artificial Sequence
  Description of Artificial Sequence: Synthetic oligonucleotide
  Target: COL7A1; (-) strand; PAM type: YTN; PAM sequence: CTT
gtatgatattagaattcagg

SEQ ID NO: 24946 - DNA, 20 bp, Artificial Sequence
  Description of Artificial Sequence: Synthetic oligonucleotide
  Target: COL7A1; (-) strand; PAM type: YTN; PAM sequence: CTG
gcatgagtgggggggtgagt

SEQ ID NO: 24947 - DNA, 20 bp, Artificial Sequence
  Description of Artificial Sequence: Synthetic oligonucleotide
  Target: COL7A1; (-) strand; PAM type: YTN; PAM sequence: CTG
gcagcaggggagagcgtggg

SEQ ID NO: 24948 - DNA, 20 bp, Artificial Sequence
  Description of Artificial Sequence: Synthetic oligonucleotide
  Target: COL7A1; (-) strand; PAM type: YTN; PAM sequence: CTC
acacaggggccccctggcag

SEQ ID NO: 24949 - DNA, 20 bp, Artificial Sequence
  Description of Artificial Sequence: Synthetic oligonucleotide
  Target: COL7A1; (-) strand; PAM type: YTN; PAM sequence: CTC
tcacacaggggccccctggc

SEQ ID NO: 24950 - DNA, 20 bp, Artificial Sequence
  Description of Artificial Sequence: Synthetic oligonucleotide
  Target: COL7A1; (-) strand; PAM type: YTN; PAM sequence: TTC
tctcacacaggggccccctg

SEQ ID NO: 24951 - DNA, 20 bp, Artificial Sequence
  Description of Artificial Sequence: Synthetic oligonucleotide
  Target: COL7A1; (-) strand; PAM type: YTN; PAM sequence: CTT
ctctcacacaggggccccct

SEQ ID NO: 24952 - DNA, 20 bp, Artificial Sequence
  Description of Artificial Sequence: Synthetic oligonucleotide
  Target: COL7A1; (-) strand; PAM type: YTN; PAM sequence: CTC
acggtcaccttctctcacac

SEQ ID NO: 24953 - DNA, 20 bp, Artificial Sequence
  Description of Artificial Sequence: Synthetic oligonucleotide
  Target: COL7A1; (-) strand; PAM type: YTN; PAM sequence: CTG
tagctcacggtcaccttctc

SEQ ID NO: 24954 - DNA, 20 bp, Artificial Sequence
  Description of Artificial Sequence: Synthetic oligonucleotide
  Target: COL7A1; (-) strand; PAM type: YTN; PAM sequence: TTC
ctgtagctcacggtcacctt

SEQ ID NO: 24955 - DNA, 20 bp, Artificial Sequence
  Description of Artificial Sequence: Synthetic oligonucleotide
  Target: COL7A1; (-) strand; PAM type: YTN; PAM sequence: CTG
gttcctgtagctcacggtca

SEQ ID NO: 24956 - DNA, 20 bp, Artificial Sequence
  Description of Artificial Sequence: Synthetic oligonucleotide
  Target: COL7A1; (-) strand; PAM type: YTN; PAM sequence: CTG
ccctggttcctgtagctcac

SEQ ID NO: 24957 - DNA, 20 bp, Artificial Sequence
  Description of Artificial Sequence: Synthetic oligonucleotide
  Target: COL7A1; (-) strand; PAM type: YTN; PAM sequence: CTC
cactgccctggttcctgtag

SEQ ID NO: 24958 - DNA, 20 bp, Artificial Sequence
  Description of Artificial Sequence: Synthetic oligonucleotide
  Target: COL7A1; (-) strand; PAM type: YTN; PAM sequence: CTC
cgtcctccactgccctggtt

SEQ ID NO: 24959 - DNA, 20 bp, Artificial Sequence
  Description of Artificial Sequence: Synthetic oligonucleotide
  Target: COL7A1; (-) strand; PAM type: YTN; PAM sequence: CTC
ctccgtcctccactgccctg

SEQ ID NO: 24960 - DNA, 20 bp, Artificial Sequence
  Description of Artificial Sequence: Synthetic oligonucleotide
  Target: COL7A1; (-) strand; PAM type: YTN; PAM sequence: CTG
atcctcctccgtcctccact

SEQ ID NO: 24961 - DNA, 20 bp, Artificial Sequence
  Description of Artificial Sequence: Synthetic oligonucleotide
  Target: COL7A1; (-) strand; PAM type: YTN; PAM sequence: CTC
cccctgatcctcctccgtcc

SEQ ID NO: 24962 - DNA, 20 bp, Artificial Sequence
  Description of Artificial Sequence: Synthetic oligonucleotide
  Target: COL7A1; (-) strand; PAM type: YTN; PAM sequence: CTC
ctccccctgatcctcctccg

SEQ ID NO: 24963 - DNA, 20 bp, Artificial Sequence
  Description of Artificial Sequence: Synthetic oligonucleotide
  Target: COL7A1; (-) strand; PAM type: YTN; PAM sequence: TTC
cctcctccccctgatcctcc

SEQ ID NO: 24964 - DNA, 20 bp, Artificial Sequence
  Description of Artificial Sequence: Synthetic oligonucleotide
  Target: COL7A1; (-) strand; PAM type: YTN; PAM sequence: TTT
ccctcctccccctgatcctc

SEQ ID NO: 24965 - DNA, 20 bp, Artificial Sequence
  Description of Artificial Sequence: Synthetic oligonucleotide
  Target: COL7A1; (-) strand; PAM type: YTN; PAM sequence: CTG
tttccctcctccccctgatc

SEQ ID NO: 24966 - DNA, 20 bp, Artificial Sequence
  Description of Artificial Sequence: Synthetic oligonucleotide
  Target: COL7A1; (-) strand; PAM type: YTN; PAM sequence: CTG
gtccccactgtttccctcct

SEQ ID NO: 24967 - DNA, 20 bp, Artificial Sequence
  Description of Artificial Sequence: Synthetic oligonucleotide
  Target: COL7A1; (-) strand; PAM type: YTN; PAM sequence: TTG
tctggtccccactgtttccc

SEQ ID NO: 24968 - DNA, 20 bp, Artificial Sequence
  Description of Artificial Sequence: Synthetic oligonucleotide
  Target: COL7A1; (-) strand; PAM type: YTN; PAM sequence: TTT
gtctggtccccactgtttcc

SEQ ID NO: 24969 - DNA, 20 bp, Artificial Sequence
  Description of Artificial Sequence: Synthetic oligonucleotide
  Target: COL7A1; (-) strand; PAM type: YTN; PAM sequence: CTT
tgtctggtccccactgtttc

SEQ ID NO: 24970 - DNA, 20 bp, Artificial Sequence
  Description of Artificial Sequence: Synthetic oligonucleotide
  Target: COL7A1; (-) strand; PAM type: YTN; PAM sequence: CTG
tcccctttgtctggtcccca

SEQ ID NO: 24971 - DNA, 20 bp, Artificial Sequence
  Description of Artificial Sequence: Synthetic oligonucleotide
  Target: COL7A1; (-) strand; PAM type: YTN; PAM sequence: CTA
cccctgtcccctttgtctgg

SEQ ID NO: 24972 - DNA, 20 bp, Artificial Sequence
  Description of Artificial Sequence: Synthetic oligonucleotide
  Target: COL7A1; (-) strand; PAM type: YTN; PAM sequence: CTC
gtctacccctgtcccctttg

SEQ ID NO: 24973 - DNA, 20 bp, Artificial Sequence
  Description of Artificial Sequence: Synthetic oligonucleotide
  Target: COL7A1; (-) strand; PAM type: YTN; PAM sequence: CTC
ctcgtctacccctgtcccct

SEQ ID NO: 24974 - DNA, 20 bp, Artificial Sequence
  Description of Artificial Sequence: Synthetic oligonucleotide
  Target: COL7A1; (-) strand; PAM type: YTN; PAM sequence: CTG
gccctcctcgtctacccctg

SEQ ID NO: 24975 - DNA, 20 bp, Artificial Sequence
  Description of Artificial Sequence: Synthetic oligonucleotide
  Target: COL7A1; (-) strand; PAM type: YTN; PAM sequence: CTC
tggccctcctcgtctacccc

SEQ ID NO: 24976 - DNA, 20 bp, Artificial Sequence
  Description of Artificial Sequence: Synthetic oligonucleotide
  Target: COL7A1; (-) strand; PAM type: YTN; PAM sequence: CTA
gccctctggccctcctcgtc

SEQ ID NO: 24977 - DNA, 20 bp, Artificial Sequence
  Description of Artificial Sequence: Synthetic oligonucleotide
  Target: COL7A1; (-) strand; PAM type: YTN; PAM sequence: CTC
cctagccctctggccctcct

SEQ ID NO: 24978 - DNA, 20 bp, Artificial Sequence
  Description of Artificial Sequence: Synthetic oligonucleotide
  Target: COL7A1; (-) strand; PAM type: YTN; PAM sequence: CTG
ccatcctccctagccctctg

SEQ ID NO: 24979 - DNA, 20 bp, Artificial Sequence
  Description of Artificial Sequence: Synthetic oligonucleotide
  Target: COL7A1; (-) strand; PAM type: YTN; PAM sequence: CTC
tgccatcctccctagccctc

SEQ ID NO: 24980 - DNA, 20 bp, Artificial Sequence
  Description of Artificial Sequence: Synthetic oligonucleotide
  Target: COL7A1; (-) strand; PAM type: YTN; PAM sequence: CTC
tctgccatcctccctagccc

SEQ ID NO: 24981 - DNA, 20 bp, Artificial Sequence
  Description of Artificial Sequence: Synthetic oligonucleotide
  Target: COL7A1; (-) strand; PAM type: YTN; PAM sequence: TTG
taccccaggactctctgcca

SEQ ID NO: 24982 - DNA, 20 bp, Artificial Sequence
  Description of Artificial Sequence: Synthetic oligonucleotide
  Target: COL7A1; (-) strand; PAM type: YTN; PAM sequence: TTT
gtaccccaggactctctgcc

SEQ ID NO: 24983 - DNA, 20 bp, Artificial Sequence
  Description of Artificial Sequence: Synthetic oligonucleotide
  Target: COL7A1; (-) strand; PAM type: YTN; PAM sequence: CTT
tgtaccccaggactctctgc

SEQ ID NO: 24984 - DNA, 20 bp, Artificial Sequence
  Description of Artificial Sequence: Synthetic oligonucleotide
  Target: COL7A1; (-) strand; PAM type: YTN; PAM sequence: CTG
tgccctttgtaccccaggac

SEQ ID NO: 24985 - DNA, 20 bp, Artificial Sequence
  Description of Artificial Sequence: Synthetic oligonucleotide
  Target: COL7A1; (-) strand; PAM type: YTN; PAM sequence: CTG
cctgtgccctttgtacccca

SEQ ID NO: 24986 - DNA, 20 bp, Artificial Sequence
  Description of Artificial Sequence: Synthetic oligonucleotide
  Target: COL7A1; (-) strand; PAM type: YTN; PAM sequence: TTC
agtcccctgcctgtgccctt

SEQ ID NO: 24987 - DNA, 20 bp, Artificial Sequence
  Description of Artificial Sequence: Synthetic oligonucleotide
  Target: COL7A1; (-) strand; PAM type: YTN; PAM sequence: CTT
cagtcccctgcctgtgccct

SEQ ID NO: 24988 - DNA, 20 bp, Artificial Sequence
  Description of Artificial Sequence: Synthetic oligonucleotide
  Target: COL7A1; (-) strand; PAM type: YTN; PAM sequence: CTG
tgacttcagtcccctgcctg

SEQ ID NO: 24989 - DNA, 20 bp, Artificial Sequence
  Description of Artificial Sequence: Synthetic oligonucleotide
  Target: COL7A1; (-) strand; PAM type: YTN; PAM sequence: CTG
gggaaagtgacagtgctgtg

SEQ ID NO: 24990 - DNA, 20 bp, Artificial Sequence
  Description of Artificial Sequence: Synthetic oligonucleotide
  Target: COL7A1; (-) strand; PAM type: YTN; PAM sequence: CTC
acggtgggtcccgctgggga

SEQ ID NO: 24991 - DNA, 20 bp, Artificial Sequence
  Description of Artificial Sequence: Synthetic oligonucleotide
  Target: COL7A1; (-) strand; PAM type: YTN; PAM sequence: CTA
atgtcaccatccagggtgaa

SEQ ID NO: 24992 - DNA, 20 bp, Artificial Sequence
  Description of Artificial Sequence: Synthetic oligonucleotide
  Target: COL7A1; (-) strand; PAM type: YTN; PAM sequence: CTG
agtcaatgaacctaatgtca

SEQ ID NO: 24993 - DNA, 20 bp, Artificial Sequence
  Description of Artificial Sequence: Synthetic oligonucleotide
  Target: COL7A1; (-) strand; PAM type: YTN; PAM sequence: CTC
tgagtcaatgaacctaatgt

SEQ ID NO: 24994 - DNA, 20 bp, Artificial Sequence
  Description of Artificial Sequence: Synthetic oligonucleotide
  Target: COL7A1; (-) strand; PAM type: YTN; PAM sequence: TTC
caacctctgagtcaatgaac

SEQ ID NO: 24995 - DNA, 20 bp, Artificial Sequence
  Description of Artificial Sequence: Synthetic oligonucleotide
  Target: COL7A1; (-) strand; PAM type: YTN; PAM sequence: TTT
ccaacctctgagtcaatgaa

SEQ ID NO: 24996 - DNA, 20 bp, Artificial Sequence
  Description of Artificial Sequence: Synthetic oligonucleotide
  Target: COL7A1; (-) strand; PAM type: YTN; PAM sequence: CTG
atttccaacctctgagtcaa

SEQ ID NO: 24997 - DNA, 20 bp, Artificial Sequence
  Description of Artificial Sequence: Synthetic oligonucleotide
  Target: COL7A1; (-) strand; PAM type: YTN; PAM sequence: CTC
tgatttccaacctctgagtc

SEQ ID NO: 24998 - DNA, 20 bp, Artificial Sequence
  Description of Artificial Sequence: Synthetic oligonucleotide
  Target: COL7A1; (-) strand; PAM type: YTN; PAM sequence: TTG
cctctgatttccaacctctg

SEQ ID NO: 24999 - DNA, 20 bp, Artificial Sequence
  Description of Artificial Sequence: Synthetic oligonucleotide
  Target: COL7A1; (-) strand; PAM type: YTN; PAM sequence: CTT
gcctctgatttccaacctct

SEQ ID NO: 25000 - DNA, 20 bp, Artificial Sequence
  Description of Artificial Sequence: Synthetic oligonucleotide
  Target: COL7A1; (-) strand; PAM type: YTN; PAM sequence: CTC
ttgcctctgatttccaacct

SEQ ID NO: 25001 - DNA, 20 bp, Artificial Sequence
  Description of Artificial Sequence: Synthetic oligonucleotide
  Target: COL7A1; (-) strand; PAM type: YTN; PAM sequence: TTC
atcccagctcttgcctctga

SEQ ID NO: 25002 - DNA, 20 bp, Artificial Sequence
  Description of Artificial Sequence: Synthetic oligonucleotide
  Target: COL7A1; (-) strand; PAM type: YTN; PAM sequence: CTT
catcccagctcttgcctctg

SEQ ID NO: 25003 - DNA, 20 bp, Artificial Sequence
  Description of Artificial Sequence: Synthetic oligonucleotide
  Target: COL7A1; (-) strand; PAM type: YTN; PAM sequence: CTC
ccttcatcccagctcttgcc

SEQ ID NO: 25004 - DNA, 20 bp, Artificial Sequence
  Description of Artificial Sequence: Synthetic oligonucleotide
  Target: COL7A1; (-) strand; PAM type: YTN; PAM sequence: CTC
cacagccgaactcccttcat

SEQ ID NO: 25005 - DNA, 20 bp, Artificial Sequence
  Description of Artificial Sequence: Synthetic oligonucleotide
  Target: COL7A1; (-) strand; PAM type: YTN; PAM sequence: TTA
ctccacagccgaactccctt

SEQ ID NO: 25006 - DNA, 20 bp, Artificial Sequence
  Description of Artificial Sequence: Synthetic oligonucleotide
  Target: COL7A1; (-) strand; PAM type: YTN; PAM sequence: CTT
actccacagccgaactccct

SEQ ID NO: 25007 - DNA, 20 bp, Artificial Sequence
  Description of Artificial Sequence: Synthetic oligonucleotide
  Target: COL7A1; (-) strand; PAM type: YTN; PAM sequence: CTG
ggccccgaggcgagcgtggg

SEQ ID NO: 25008 - DNA, 20 bp, Artificial Sequence
  Description of Artificial Sequence: Synthetic oligonucleotide
  Target: COL7A1; (-) strand; PAM type: YTN; PAM sequence: CTG
cctgggccccgaggcgagcg

SEQ ID NO: 25009 - DNA, 20 bp, Artificial Sequence
  Description of Artificial Sequence: Synthetic oligonucleotide
  Target: COL7A1; (-) strand; PAM type: YTN; PAM sequence: CTG
gagtagggctgcctgggccc

SEQ ID NO: 25010 - DNA, 20 bp, Artificial Sequence
  Description of Artificial Sequence: Synthetic oligonucleotide
  Target: COL7A1; (-) strand; PAM type: YTN; PAM sequence: CTC
cagggagaccctggagtagg

SEQ ID NO: 25011 - DNA, 20 bp, Artificial Sequence
  Description of Artificial Sequence: Synthetic oligonucleotide
  Target: COL7A1; (-) strand; PAM type: YTN; PAM sequence: TTG
gtctccagggagaccctgga

SEQ ID NO: 25012 - DNA, 20 bp, Artificial Sequence
  Description of Artificial Sequence: Synthetic oligonucleotide
  Target: COL7A1; (-) strand; PAM type: YTN; PAM sequence: CTG
ttggtctccagggagaccct

SEQ ID NO: 25013 - DNA, 20 bp, Artificial Sequence
  Description of Artificial Sequence: Synthetic oligonucleotide
  Target: COL7A1; (-) strand; PAM type: YTN; PAM sequence: CTG
atccccggtgtcctgttggt

SEQ ID NO: 25014 - DNA, 20 bp, Artificial Sequence
  Description of Artificial Sequence: Synthetic oligonucleotide
  Target: COL7A1; (-) strand; PAM type: YTN; PAM sequence: CTC
actgatccccggtgtcctgt

SEQ ID NO: 25015 - DNA, 20 bp, Artificial Sequence
  Description of Artificial Sequence: Synthetic oligonucleotide
  Target: COL7A1; (-) strand; PAM type: YTN; PAM sequence: TTC
ccctcactgatccccggtgt

SEQ ID NO: 25016 - DNA, 20 bp, Artificial Sequence
  Description of Artificial Sequence: Synthetic oligonucleotide
  Target: COL7A1; (-) strand; PAM type: YTN; PAM sequence: CTG
attcccctcactgatccccg

SEQ ID NO: 25017 - DNA, 20 bp, Artificial Sequence
  Description of Artificial Sequence: Synthetic oligonucleotide
  Target: COL7A1; (-) strand; PAM type: YTN; PAM sequence: CTG
cgtcccccactgattcccct

SEQ ID NO: 25018 - DNA, 20 bp, Artificial Sequence
  Description of Artificial Sequence: Synthetic oligonucleotide
  Target: COL7A1; (-) strand; PAM type: YTN; PAM sequence: CTC
ccatgaccctgcgtccccca

SEQ ID NO: 25019 - DNA, 20 bp, Artificial Sequence
  Description of Artificial Sequence: Synthetic oligonucleotide
  Target: COL7A1; (-) strand; PAM type: YTN; PAM sequence: CTG
acctcccatgaccctgcgtc

SEQ ID NO: 25020 - DNA, 20 bp, Artificial Sequence
  Description of Artificial Sequence: Synthetic oligonucleotide
  Target: COL7A1; (-) strand; PAM type: YTN; PAM sequence: CTC
cactgacctcccatgaccct

SEQ ID NO: 25021 - DNA, 20 bp, Artificial Sequence
  Description of Artificial Sequence: Synthetic oligonucleotide
  Target: COL7A1; (-) strand; PAM type: YTN; PAM sequence: TTC
agcctccactgacctcccat

SEQ ID NO: 25022 - DNA, 20 bp, Artificial Sequence
  Description of Artificial Sequence: Synthetic oligonucleotide
  Target: COL7A1; (-) strand; PAM type: YTN; PAM sequence: CTT
cagcctccactgacctccca

SEQ ID NO: 25023 - DNA, 20 bp, Artificial Sequence
  Description of Artificial Sequence: Synthetic oligonucleotide
  Target: COL7A1; (-) strand; PAM type: YTN; PAM sequence: CTG
gtcacccccttcagcctcca

SEQ ID NO: 25024 - DNA, 20 bp, Artificial Sequence
  Description of Artificial Sequence: Synthetic oligonucleotide
  Target: COL7A1; (-) strand; PAM type: YTN; PAM sequence: TTG
tgccctggtcacccccttca

SEQ ID NO: 25025 - DNA, 20 bp, Artificial Sequence
  Description of Artificial Sequence: Synthetic oligonucleotide
  Target: COL7A1; (-) strand; PAM type: YTN; PAM sequence: CTT
gtgccctggtcacccccttc

SEQ ID NO: 25026 - DNA, 20 bp, Artificial Sequence
  Description of Artificial Sequence: Synthetic oligonucleotide
  Target: COL7A1; (-) strand; PAM type: YTN; PAM sequence: CTC
ttgtgccctggtcaccccct

SEQ ID NO: 25027 - DNA, 20 bp, Artificial Sequence
  Description of Artificial Sequence: Synthetic oligonucleotide
  Target: COL7A1; (-) strand; PAM type: YTN; PAM sequence: CTC
tcttgtgccctggtcacccc

SEQ ID NO: 25028 - DNA, 20 bp, Artificial Sequence
  Description of Artificial Sequence: Synthetic oligonucleotide
  Target: COL7A1; (-) strand; PAM type: YTN; PAM sequence: CTC
tctcttgtgccctggtcacc

SEQ ID NO: 25029 - DNA, 20 bp, Artificial Sequence
  Description of Artificial Sequence: Synthetic oligonucleotide
  Target: COL7A1; (-) strand; PAM type: YTN; PAM sequence: CTG
actctctcttgtgccctggt

SEQ ID NO: 25030 - DNA, 20 bp, Artificial Sequence
  Description of Artificial Sequence: Synthetic oligonucleotide
  Target: COL7A1; (-) strand; PAM type: YTN; PAM sequence: CTG
ctgactctctcttgtgccct

SEQ ID NO: 25031 - DNA, 20 bp, Artificial Sequence
  Description of Artificial Sequence: Synthetic oligonucleotide
  Target: COL7A1; (-) strand; PAM type: YTN; PAM sequence: CTC
aaaggagacaaggtaggtgg

SEQ ID NO: 25032 - DNA, 20 bp, Artificial Sequence
  Description of Artificial Sequence: Synthetic oligonucleotide
  Target: COL7A1; (-) strand; PAM type: YTN; PAM sequence: CTG
gactcaaaggagacaaggta

SEQ ID NO: 25033 - DNA, 20 bp, Artificial Sequence
  Description of Artificial Sequence: Synthetic oligonucleotide
  Target: COL7A1; (-) strand; PAM type: YTN; PAM sequence: CTC
tggactcaaaggagacaagg

SEQ ID NO: 25034 - DNA, 20 bp, Artificial Sequence
  Description of Artificial Sequence: Synthetic oligonucleotide
  Target: COL7A1; (-) strand; PAM type: YTN; PAM sequence: CTG
gggcctctggactcaaagga

SEQ ID NO: 25035 - DNA, 20 bp, Artificial Sequence
  Description of Artificial Sequence: Synthetic oligonucleotide
  Target: COL7A1; (-) strand; PAM type: YTN; PAM sequence: CTA
cagggaccacctggggcctc

SEQ ID NO: 25036 - DNA, 20 bp, Artificial Sequence
  Description of Artificial Sequence: Synthetic oligonucleotide
  Target: COL7A1; (-) strand; PAM type: YTN; PAM sequence: CTG
acctacagggaccacctggg

SEQ ID NO: 25037 - DNA, 20 bp, Artificial Sequence
  Description of Artificial Sequence: Synthetic oligonucleotide
  Target: COL7A1; (-) strand; PAM type: YTN; PAM sequence: CTC
tgacctacagggaccacctg

SEQ ID NO: 25038 - DNA, 20 bp, Artificial Sequence
  Description of Artificial Sequence: Synthetic oligonucleotide
  Target: COL7A1; (-) strand; PAM type: YTN; PAM sequence: CTC
actctgacctacagggacca

SEQ ID NO: 25039 - DNA, 20 bp, Artificial Sequence
  Description of Artificial Sequence: Synthetic oligonucleotide
  Target: COL7A1; (-) strand; PAM type: YTN; PAM sequence: CTC
acctcactctgacctacagg

SEQ ID NO: 25040 - DNA, 20 bp, Artificial Sequence
  Description of Artificial Sequence: Synthetic oligonucleotide
  Target: COL7A1; (-) strand; PAM type: YTN; PAM sequence: TTG
agagccacaggaccctcacc

SEQ ID NO: 25041 - DNA, 20 bp, Artificial Sequence
  Description of Artificial Sequence: Synthetic oligonucleotide
  Target: COL7A1; (-) strand; PAM type: YTN; PAM sequence: TTT
gagagccacaggaccctcac

SEQ ID NO: 25042 - DNA, 20 bp, Artificial Sequence
  Description of Artificial Sequence: Synthetic oligonucleotide
  Target: COL7A1; (-) strand; PAM type: YTN; PAM sequence: CTT
tgagagccacaggaccctca

SEQ ID NO: 25043 - DNA, 20 bp, Artificial Sequence
  Description of Artificial Sequence: Synthetic oligonucleotide
  Target: COL7A1; (-) strand; PAM type: YTN; PAM sequence: TTG
ggggaggcgctttgagagcc

SEQ ID NO: 25044 - DNA, 20 bp, Artificial Sequence
  Description of Artificial Sequence: Synthetic oligonucleotide
  Target: COL7A1; (-) strand; PAM type: YTN; PAM sequence: CTG
tggggtgttgggggaggcgc

SEQ ID NO: 25045 - DNA, 20 bp, Artificial Sequence
  Description of Artificial Sequence: Synthetic oligonucleotide
  Target: COL7A1; (-) strand; PAM type: YTN; PAM sequence: TTA
ggatggggcgggccacactg

SEQ ID NO: 25046 - DNA, 20 bp, Artificial Sequence
  Description of Artificial Sequence: Synthetic oligonucleotide
  Target: COL7A1; (-) strand; PAM type: YTN; PAM sequence: CTT
aggatggggcgggccacact

SEQ ID NO: 25047 - DNA, 20 bp, Artificial Sequence
  Description of Artificial Sequence: Synthetic oligonucleotide
  Target: COL7A1; (-) strand; PAM type: YTN; PAM sequence: CTC
gtgaggacttaggatggggc

SEQ ID NO: 25048 - DNA, 20 bp, Artificial Sequence
  Description of Artificial Sequence: Synthetic oligonucleotide
  Target: COL7A1; (-) strand; PAM type: YTN; PAM sequence: CTG
tcctcgtgaggacttaggat

SEQ ID NO: 25049 - DNA, 20 bp, Artificial Sequence
  Description of Artificial Sequence: Synthetic oligonucleotide
  Target: COL7A1; (-) strand; PAM type: YTN; PAM sequence: TTC
ctgtcctcgtgaggacttag

SEQ ID NO: 25050 - DNA, 20 bp, Artificial Sequence
  Description of Artificial Sequence: Synthetic oligonucleotide
  Target: COL7A1; (-) strand; PAM type: YTN; PAM sequence: TTT
cctgtcctcgtgaggactta

SEQ ID NO: 25051 - DNA, 20 bp, Artificial Sequence
  Description of Artificial Sequence: Synthetic oligonucleotide
  Target: COL7A1; (-) strand; PAM type: YTN; PAM sequence: TTG
atttcctgtcctcgtgagga

SEQ ID NO: 25052 - DNA, 20 bp, Artificial Sequence
  Description of Artificial Sequence: Synthetic oligonucleotide
  Target: COL7A1; (-) strand; PAM type: YTN; PAM sequence: TTT
gatttcctgtcctcgtgagg

SEQ ID NO: 25053 - DNA, 20 bp, Artificial Sequence
  Description of Artificial Sequence: Synthetic oligonucleotide
  Target: COL7A1; (-) strand; PAM type: YTN; PAM sequence: CTA
aagccccacgtatttgattt

SEQ ID NO: 25054 - DNA, 20 bp, Artificial Sequence
  Description of Artificial Sequence: Synthetic oligonucleotide
  Target: COL7A1; (-) strand; PAM type: YTN; PAM sequence: CTG
gaccaccggggtcagtggtg

SEQ ID NO: 25055 - DNA, 20 bp, Artificial Sequence
  Description of Artificial Sequence: Synthetic oligonucleotide
  Target: COL7A1; (-) strand; PAM type: YTN; PAM sequence: CTG
gggccacctggaccaccggg

SEQ ID NO: 25056 - DNA, 20 bp, Artificial Sequence
  Description of Artificial Sequence: Synthetic oligonucleotide
  Target: COL7A1; (-) strand; PAM type: YTN; PAM sequence: CTG
gcaggccccccagggagaga

SEQ ID NO: 25057 - DNA, 20 bp, Artificial Sequence
  Description of Artificial Sequence: Synthetic oligonucleotide
  Target: COL7A1; (-) strand; PAM type: YTN; PAM sequence: CTG
gtagggtctggcaggccccc

SEQ ID NO: 25058 - DNA, 20 bp, Artificial Sequence
  Description of Artificial Sequence: Synthetic oligonucleotide
  Target: COL7A1; (-) strand; PAM type: YTN; PAM sequence: TTC
tggtagggtctggcaggccc

SEQ ID NO: 25059 - DNA, 20 bp, Artificial Sequence
  Description of Artificial Sequence: Synthetic oligonucleotide
  Target: COL7A1; (-) strand; PAM type: YTN; PAM sequence: TTT
ctggtagggtctggcaggcc

SEQ ID NO: 25060 - DNA, 20 bp, Artificial Sequence
  Description of Artificial Sequence: Synthetic oligonucleotide
  Target: COL7A1; (-) strand; PAM type: YTN; PAM sequence: TTT
tctggtagggtctggcaggc

SEQ ID NO: 25061 - DNA, 20 bp, Artificial Sequence
  Description of Artificial Sequence: Synthetic oligonucleotide
  Target: COL7A1; (-) strand; PAM type: YTN; PAM sequence: TTT
ttctggtagggtctggcagg

SEQ ID NO: 25062 - DNA, 20 bp, Artificial Sequence
  Description of Artificial Sequence: Synthetic oligonucleotide
  Target: COL7A1; (-) strand; PAM type: YTN; PAM sequence: TTG
ccccatttttctggtagggt

SEQ ID NO: 25063 - DNA, 20 bp, Artificial Sequence
  Description of Artificial Sequence: Synthetic oligonucleotide
  Target: COL7A1; (-) strand; PAM type: YTN; PAM sequence: CTT
gccccatttttctggtaggg

SEQ ID NO: 25064 - DNA, 20 bp, Artificial Sequence
  Description of Artificial Sequence: Synthetic oligonucleotide
  Target: COL7A1; (-) strand; PAM type: YTN; PAM sequence: CTC
ttgccccatttttctggtag

SEQ ID NO: 25065 - DNA, 20 bp, Artificial Sequence
  Description of Artificial Sequence: Synthetic oligonucleotide
  Target: COL7A1; (-) strand; PAM type: YTN; PAM sequence: CTC
tcttgccccatttttctggt

SEQ ID NO: 25066 - DNA, 20 bp, Artificial Sequence
  Description of Artificial Sequence: Synthetic oligonucleotide
  Target: COL7A1; (-) strand; PAM type: YTN; PAM sequence: CTG
cctctcttgccccatttttc

SEQ ID NO: 25067 - DNA, 20 bp, Artificial Sequence
  Description of Artificial Sequence: Synthetic oligonucleotide
  Target: COL7A1; (-) strand; PAM type: YTN; PAM sequence: CTC
tgcctctcttgccccatttt

SEQ ID NO: 25068 - DNA, 20 bp, Artificial Sequence
  Description of Artificial Sequence: Synthetic oligonucleotide
  Target: COL7A1; (-) strand; PAM type: YTN; PAM sequence: CTC
tctgcctctcttgccccatt

SEQ ID NO: 25069 - DNA, 20 bp, Artificial Sequence
  Description of Artificial Sequence: Synthetic oligonucleotide
  Target: COL7A1; (-) strand; PAM type: YTN; PAM sequence: TTC
ccaagtcactctctgcctct

SEQ ID NO: 25070 - DNA, 20 bp, Artificial Sequence
  Description of Artificial Sequence: Synthetic oligonucleotide
  Target: COL7A1; (-) strand; PAM type: YTN; PAM sequence: TTG
agggggcagagggtaggagg

SEQ ID NO: 25071 - DNA, 20 bp, Artificial Sequence
  Description of Artificial Sequence: Synthetic oligonucleotide
  Target: COL7A1; (-) strand; PAM type: YTN; PAM sequence: CTT
gagggggcagagggtaggag

SEQ ID NO: 25072 - DNA, 20 bp, Artificial Sequence
  Description of Artificial Sequence: Synthetic oligonucleotide
  Target: COL7A1; (-) strand; PAM type: YTN; PAM sequence: TTC
ccagtcttgagggggcagag

SEQ ID NO: 25073 - DNA, 20 bp, Artificial Sequence
  Description of Artificial Sequence: Synthetic oligonucleotide
  Target: COL7A1; (-) strand; PAM type: YTN; PAM sequence: TTG
ggggttcccagtcttgaggg

SEQ ID NO: 25074 - DNA, 20 bp, Artificial Sequence
  Description of Artificial Sequence: Synthetic oligonucleotide
  Target: COL7A1; (-) strand; PAM type: YTN; PAM sequence: CTT
gggggttcccagtcttgagg

SEQ ID NO: 25075 - DNA, 20 bp, Artificial Sequence
  Description of Artificial Sequence: Synthetic oligonucleotide
  Target: COL7A1; (-) strand; PAM type: YTN; PAM sequence: CTG
ccttgggggttcccagtctt

SEQ ID NO: 25076 - DNA, 20 bp, Artificial Sequence
  Description of Artificial Sequence: Synthetic oligonucleotide
  Target: COL7A1; (-) strand; PAM type: YTN; PAM sequence: CTG
ggaacagcatgtaggggcat

SEQ ID NO: 25077 - DNA, 20 bp, Artificial Sequence
  Description of Artificial Sequence: Synthetic oligonucleotide
  Target: COL7A1; (-) strand; PAM type: YTN; PAM sequence: CTA
gtggagagcgggtgaggggc

SEQ ID NO: 25078 - DNA, 20 bp, Artificial Sequence
  Description of Artificial Sequence: Synthetic oligonucleotide
  Target: COL7A1; (-) strand; PAM type: YTN; PAM sequence: CTC
gaggagagatgggtcagcca

SEQ ID NO: 25079 - DNA, 20 bp, Artificial Sequence
  Description of Artificial Sequence: Synthetic oligonucleotide
  Target: COL7A1; (-) strand; PAM type: YTN; PAM sequence: TTC
ccgggtcagacaggccctcg

SEQ ID NO: 25080 - DNA, 20 bp, Artificial Sequence
  Description of Artificial Sequence: Synthetic oligonucleotide
  Target: COL7A1; (-) strand; PAM type: YTN; PAM sequence: TTG
ggttcccgggtcagacaggc

SEQ ID NO: 25081 - DNA, 20 bp, Artificial Sequence
  Description of Artificial Sequence: Synthetic oligonucleotide
  Target: COL7A1; (-) strand; PAM type: YTN; PAM sequence: TTG
ttgggttcccgggtcagaca

SEQ ID NO: 25082 - DNA, 20 bp, Artificial Sequence
  Description of Artificial Sequence: Synthetic oligonucleotide
  Target: COL7A1; (-) strand; PAM type: YTN; PAM sequence: CTG
gtgttgttgggttcccgggt

SEQ ID NO: 25083 - DNA, 20 bp, Artificial Sequence
  Description of Artificial Sequence: Synthetic oligonucleotide
  Target: COL7A1; (-) strand; PAM type: YTN; PAM sequence: CTC
ctggtgttgttgggttcccg

SEQ ID NO: 25084 - DNA, 20 bp, Artificial Sequence
  Description of Artificial Sequence: Synthetic oligonucleotide
  Target: COL7A1; (-) strand; PAM type: YTN; PAM sequence: CTG
cccggtgctcctggtgttgt

SEQ ID NO: 25085 - DNA, 20 bp, Artificial Sequence
  Description of Artificial Sequence: Synthetic oligonucleotide
  Target: COL7A1; (-) strand; PAM type: YTN; PAM sequence: CTG
gcctgcccggtgctcctggt

SEQ ID NO: 25086 - DNA, 20 bp, Artificial Sequence
  Description of Artificial Sequence: Synthetic oligonucleotide
  Target: COL7A1; (-) strand; PAM type: YTN; PAM sequence: CTC
cctggcctgcccggtgctcc

SEQ ID NO: 25087 - DNA, 20 bp, Artificial Sequence
  Description of Artificial Sequence: Synthetic oligonucleotide
  Target: COL7A1; (-) strand; PAM type: YTN; PAM sequence: CTG
ggcctccctggcctgcccgg

SEQ ID NO: 25088 - DNA, 20 bp, Artificial Sequence
  Description of Artificial Sequence: Synthetic oligonucleotide
  Target: COL7A1; (-) strand; PAM type: YTN; PAM sequence: TTC
agggagatctgggcctccct

SEQ ID NO: 25089 - DNA, 20 bp, Artificial Sequence
  Description of Artificial Sequence: Synthetic oligonucleotide
  Target: COL7A1; (-) strand; PAM type: YTN; PAM sequence: TTT
cagggagatctgggcctccc

SEQ ID NO: 25090 - DNA, 20 bp, Artificial Sequence
  Description of Artificial Sequence: Synthetic oligonucleotide
  Target: COL7A1; (-) strand; PAM type: YTN; PAM sequence: TTA
tttcagggagatctgggcct

SEQ ID NO: 25091 - DNA, 20 bp, Artificial Sequence
  Description of Artificial Sequence: Synthetic oligonucleotide
  Target: COL7A1; (-) strand; PAM type: YTN; PAM sequence: TTT
atttcagggagatctgggcc

SEQ ID NO: 25092 - DNA, 20 bp, Artificial Sequence
  Description of Artificial Sequence: Synthetic oligonucleotide
  Target: COL7A1; (-) strand; PAM type: YTN; PAM sequence: TTT
tatttcagggagatctgggc

SEQ ID NO: 25093 - DNA, 20 bp, Artificial Sequence
  Description of Artificial Sequence: Synthetic oligonucleotide
  Target: COL7A1; (-) strand; PAM type: YTN; PAM sequence: TTT
ttatttcagggagatctggg

SEQ ID NO: 25094 - DNA, 20 bp, Artificial Sequence
  Description of Artificial Sequence: Synthetic oligonucleotide
  Target: COL7A1; (-) strand; PAM type: YTN; PAM sequence: CTG
tttttatttcagggagatct

SEQ ID NO: 25095 - DNA, 20 bp, Artificial Sequence
  Description of Artificial Sequence: Synthetic oligonucleotide
  Target: COL7A1; (-) strand; PAM type: YTN; PAM sequence: TTG
ctgtttttatttcagggaga

SEQ ID NO: 25096 - DNA, 20 bp, Artificial Sequence
  Description of Artificial Sequence: Synthetic oligonucleotide
  Target: COL7A1; (-) strand; PAM type: YTN; PAM sequence: TTT
gctgtttttatttcagggag

SEQ ID NO: 25097 - DNA, 20 bp, Artificial Sequence
  Description of Artificial Sequence: Synthetic oligonucleotide
  Target: COL7A1; (-) strand; PAM type: YTN; PAM sequence: CTT
tgctgtttttatttcaggga

SEQ ID NO: 25098 - DNA, 20 bp, Artificial Sequence
  Description of Artificial Sequence: Synthetic oligonucleotide
  Target: COL7A1; (-) strand; PAM type: YTN; PAM sequence: CTC
cctttgctgtttttatttca

SEQ ID NO: 25099 - DNA, 20 bp, Artificial Sequence
  Description of Artificial Sequence: Synthetic oligonucleotide
  Target: COL7A1; (-) strand; PAM type: YTN; PAM sequence: TTC
cctccctttgctgtttttat

SEQ ID NO: 25100 - DNA, 20 bp, Artificial Sequence
  Description of Artificial Sequence: Synthetic oligonucleotide
  Target: COL7A1; (-) strand; PAM type: YTN; PAM sequence: TTG
accattccctccctttgctg

SEQ ID NO: 25101 - DNA, 20 bp, Artificial Sequence
  Description of Artificial Sequence: Synthetic oligonucleotide
  Target: COL7A1; (-) strand; PAM type: YTN; PAM sequence: CTG
cattgaccattccctccctt

SEQ ID NO: 25102 - DNA, 20 bp, Artificial Sequence
  Description of Artificial Sequence: Synthetic oligonucleotide
  Target: COL7A1; (-) strand; PAM type: YTN; PAM sequence: CTG
ggaggggtcctgcattgacc

SEQ ID NO: 25103 - DNA, 20 bp, Artificial Sequence
  Description of Artificial Sequence: Synthetic oligonucleotide
  Target: COL7A1; (-) strand; PAM type: YTN; PAM sequence: CTG
atgagagtcctgggaggggt

SEQ ID NO: 25104 - DNA, 20 bp, Artificial Sequence
  Description of Artificial Sequence: Synthetic oligonucleotide
  Target: COL7A1; (-) strand; PAM type: YTN; PAM sequence: TTC
tgatgagagtcctgggaggg

SEQ ID NO: 25105 - DNA, 20 bp, Artificial Sequence
  Description of Artificial Sequence: Synthetic oligonucleotide
  Target: COL7A1; (-) strand; PAM type: YTN; PAM sequence: TTG
taggggcagcaggccgggcc

SEQ ID NO: 25106 - DNA, 20 bp, Artificial Sequence
  Description of Artificial Sequence: Synthetic oligonucleotide
  Target: COL7A1; (-) strand; PAM type: YTN; PAM sequence: CTC
caggtgtgaaggtaagtcaa

SEQ ID NO: 25107 - DNA, 20 bp, Artificial Sequence
  Description of Artificial Sequence: Synthetic oligonucleotide
  Target: COL7A1; (-) strand; PAM type: YTN; PAM sequence: CTG
gccctccaggtgtgaaggta

SEQ ID NO: 25108 - DNA, 20 bp, Artificial Sequence
  Description of Artificial Sequence: Synthetic oligonucleotide
  Target: COL7A1; (-) strand; PAM type: YTN; PAM sequence: CTC
ctggccctccaggtgtgaag

SEQ ID NO: 25109 - DNA, 20 bp, Artificial Sequence
  Description of Artificial Sequence: Synthetic oligonucleotide
  Target: COL7A1; (-) strand; PAM type: YTN; PAM sequence: CTG
ggcctcctggccctccaggt

SEQ ID NO: 25110 - DNA, 20 bp, Artificial Sequence
  Description of Artificial Sequence: Synthetic oligonucleotide
  Target: COL7A1; (-) strand; PAM type: YTN; PAM sequence: CTC
ccctgggcctcctggccctc

SEQ ID NO: 25111 - DNA, 20 bp, Artificial Sequence
  Description of Artificial Sequence: Synthetic oligonucleotide
  Target: COL7A1; (-) strand; PAM type: YTN; PAM sequence: CTC
aaagggtgacccaggagtcg

SEQ ID NO: 25112 - DNA, 20 bp, Artificial Sequence
  Description of Artificial Sequence: Synthetic oligonucleotide
  Target: COL7A1; (-) strand; PAM type: YTN; PAM sequence: TTC
ctcaaagggtgacccaggag

SEQ ID NO: 25113 - DNA, 20 bp, Artificial Sequence
  Description of Artificial Sequence: Synthetic oligonucleotide
  Target: COL7A1; (-) strand; PAM type: YTN; PAM sequence: TTT
cctcaaagggtgacccagga

SEQ ID NO: 25114 - DNA, 20 bp, Artificial Sequence
  Description of Artificial Sequence: Synthetic oligonucleotide
  Target: COL7A1; (-) strand; PAM type: YTN; PAM sequence: TTT
tcctcaaagggtgacccagg

SEQ ID NO: 25115 - DNA, 20 bp, Artificial Sequence
  Description of Artificial Sequence: Synthetic oligonucleotide
  Target: COL7A1; (-) strand; PAM type: YTN; PAM sequence: CTT
ttcctcaaagggtgacccag

SEQ ID NO: 25116 - DNA, 20 bp, Artificial Sequence
  Description of Artificial Sequence: Synthetic oligonucleotide
  Target: COL7A1; (-) strand; PAM type: YTN; PAM sequence: CTC
ttttcctcaaagggtgaccc

SEQ ID NO: 25117 - DNA, 20 bp, Artificial Sequence
  Description of Artificial Sequence: Synthetic oligonucleotide
  Target: COL7A1; (-) strand; PAM type: YTN; PAM sequence: TTG
atccgatgcctcttttcctc

SEQ ID NO: 25118 - DNA, 20 bp, Artificial Sequence
  Description of Artificial Sequence: Synthetic oligonucleotide
  Target: COL7A1; (-) strand; PAM type: YTN; PAM sequence: CTT
gatccgatgcctcttttcct

SEQ ID NO: 25119 - DNA, 20 bp, Artificial Sequence
  Description of Artificial Sequence: Synthetic oligonucleotide
  Target: COL7A1; (-) strand; PAM type: YTN; PAM sequence: CTG
agcttgatccgatgcctctt

SEQ ID NO: 25120 - DNA, 20 bp, Artificial Sequence
  Description of Artificial Sequence: Synthetic oligonucleotide
  Target: COL7A1; (-) strand; PAM type: YTN; PAM sequence: CTC
cctgagcttgatccgatgcc

SEQ ID NO: 25121 - DNA, 20 bp, Artificial Sequence
  Description of Artificial Sequence: Synthetic oligonucleotide
  Target: COL7A1; (-) strand; PAM type: YTN; PAM sequence: CTG
gtcgtgagactccctgagct

SEQ ID NO: 25122 - DNA, 20 bp, Artificial Sequence
  Description of Artificial Sequence: Synthetic oligonucleotide
  Target: COL7A1; (-) strand; PAM type: YTN; PAM sequence: CTG
gggtcctggtcgtgagactc

SEQ ID NO: 25123 - DNA, 20 bp, Artificial Sequence
  Description of Artificial Sequence: Synthetic oligonucleotide
  Target: COL7A1; (-) strand; PAM type: YTN; PAM sequence: CTG
ctggggtcctggtcgtgaga

SEQ ID NO: 25124 - DNA, 20 bp, Artificial Sequence
  Description of Artificial Sequence: Synthetic oligonucleotide
  Target: COL7A1; (-) strand; PAM type: YTN; PAM sequence: TTC
aaggtatgtgtacccagaag

SEQ ID NO: 25125 - DNA, 20 bp, Artificial Sequence
  Description of Artificial Sequence: Synthetic oligonucleotide
  Target: COL7A1; (-) strand; PAM type: YTN; PAM sequence: TTT
caaggtatgtgtacccagaa

SEQ ID NO: 25126 - DNA, 20 bp, Artificial Sequence
  Description of Artificial Sequence: Synthetic oligonucleotide
  Target: COL7A1; (-) strand; PAM type: YTN; PAM sequence: CTC
caggacccaaaggtttcaag

SEQ ID NO: 25127 - DNA, 20 bp, Artificial Sequence
  Description of Artificial Sequence: Synthetic oligonucleotide
  Target: COL7A1; (-) strand; PAM type: YTN; PAM sequence: TTA
gggtcagaaaggggctccag

SEQ ID NO: 25128 - DNA, 20 bp, Artificial Sequence
  Description of Artificial Sequence: Synthetic oligonucleotide
  Target: COL7A1; (-) strand; PAM type: YTN; PAM sequence: CTT
agggtcagaaaggggctcca

SEQ ID NO: 25129 - DNA, 20 bp, Artificial Sequence
  Description of Artificial Sequence: Synthetic oligonucleotide
  Target: COL7A1; (-) strand; PAM type: YTN; PAM sequence: TTC
ttagggtcagaaaggggctc

SEQ ID NO: 25130 - DNA, 20 bp, Artificial Sequence
  Description of Artificial Sequence: Synthetic oligonucleotide
  Target: COL7A1; (-) strand; PAM type: YTN; PAM sequence: TTT
cttagggtcagaaaggggct

SEQ ID NO: 25131 - DNA, 20 bp, Artificial Sequence
  Description of Artificial Sequence: Synthetic oligonucleotide
  Target: COL7A1; (-) strand; PAM type: YTN; PAM sequence: TTT
tcttagggtcagaaaggggc

SEQ ID NO: 25132 - DNA, 20 bp, Artificial Sequence
  Description of Artificial Sequence: Synthetic oligonucleotide
  Target: COL7A1; (-) strand; PAM type: YTN; PAM sequence: CTG
ggttttcttagggtcagaaa

SEQ ID NO: 25133 - DNA, 20 bp, Artificial Sequence
  Description of Artificial Sequence: Synthetic oligonucleotide
  Target: COL7A1; (-) strand; PAM type: YTN; PAM sequence: TTG
ctgggttttcttagggtcag

SEQ ID NO: 25134 - DNA, 20 bp, Artificial Sequence
  Description of Artificial Sequence: Synthetic oligonucleotide
  Target: COL7A1; (-) strand; PAM type: YTN; PAM sequence: TTT
gctgggttttcttagggtca

SEQ ID NO: 25135 - DNA, 20 bp, Artificial Sequence
  Description of Artificial Sequence: Synthetic oligonucleotide
  Target: COL7A1; (-) strand; PAM type: YTN; PAM sequence: CTG
tttgctgggttttcttaggg

SEQ ID NO: 25136 - DNA, 20 bp, Artificial Sequence
  Description of Artificial Sequence: Synthetic oligonucleotide
  Target: COL7A1; (-) strand; PAM type: YTN; PAM sequence: CTC
aaatgctgtttgctgggttt

SEQ ID NO: 25137 - DNA, 20 bp, Artificial Sequence
  Description of Artificial Sequence: Synthetic oligonucleotide
  Target: COL7A1; (-) strand; PAM type: YTN; PAM sequence: CTC
tcaaatgctgtttgctgggt

SEQ ID NO: 25138 - DNA, 20 bp, Artificial Sequence
  Description of Artificial Sequence: Synthetic oligonucleotide
  Target: COL7A1; (-) strand; PAM type: YTN; PAM sequence: CTA
ccctctcaaatgctgtttgc

SEQ ID NO: 25139 - DNA, 20 bp, Artificial Sequence
  Description of Artificial Sequence: Synthetic oligonucleotide
  Target: COL7A1; (-) strand; PAM type: YTN; PAM sequence: TTC
ctaccctctcaaatgctgtt

SEQ ID NO: 25140 - DNA, 20 bp, Artificial Sequence
  Description of Artificial Sequence: Synthetic oligonucleotide
  Target: COL7A1; (-) strand; PAM type: YTN; PAM sequence: CTC
atgttcctaccctctcaaat

SEQ ID NO: 25141 - DNA, 20 bp, Artificial Sequence
  Description of Artificial Sequence: Synthetic oligonucleotide
  Target: COL7A1; (-) strand; PAM type: YTN; PAM sequence: CTG
tgctcatgttcctaccctct

SEQ ID NO: 25142 - DNA, 20 bp, Artificial Sequence
  Description of Artificial Sequence: Synthetic oligonucleotide
  Target: COL7A1; (-) strand; PAM type: YTN; PAM sequence: CTC
tgtgctcatgttcctaccct

SEQ ID NO: 25143 - DNA, 20 bp, Artificial Sequence
  Description of Artificial Sequence: Synthetic oligonucleotide
  Target: COL7A1; (-) strand; PAM type: YTN; PAM sequence: CTG
aactctgtgctcatgttcct

SEQ ID NO: 25144 - DNA, 20 bp, Artificial Sequence
  Description of Artificial Sequence: Synthetic oligonucleotide
  Target: COL7A1; (-) strand; PAM type: YTN; PAM sequence: TTC
agcccgtgtctgaactctgt

SEQ ID NO: 25145 - DNA, 20 bp, Artificial Sequence
  Description of Artificial Sequence: Synthetic oligonucleotide
  Target: COL7A1; (-) strand; PAM type: YTN; PAM sequence: TTT
cagcccgtgtctgaactctg

SEQ ID NO: 25146 - DNA, 20 bp, Artificial Sequence
  Description of Artificial Sequence: Synthetic oligonucleotide
  Target: COL7A1; (-) strand; PAM type: YTN; PAM sequence: TTT
tcagcccgtgtctgaactct

SEQ ID NO: 25147 - DNA, 20 bp, Artificial Sequence
  Description of Artificial Sequence: Synthetic oligonucleotide
  Target: COL7A1; (-) strand; PAM type: YTN; PAM sequence: CTG
ggaatattttcagcccgtgt

SEQ ID NO: 25148 - DNA, 20 bp, Artificial Sequence
  Description of Artificial Sequence: Synthetic oligonucleotide
  Target: COL7A1; (-) strand; PAM type: YTN; PAM sequence: CTC
ccctgggaatattttcagcc

SEQ ID NO: 25149 - DNA, 20 bp, Artificial Sequence
  Description of Artificial Sequence: Synthetic oligonucleotide
  Target: COL7A1; (-) strand; PAM type: YTN; PAM sequence: TTC
atggtcacatcagaactccc

SEQ ID NO: 25150 - DNA, 20 bp, Artificial Sequence
  Description of Artificial Sequence: Synthetic oligonucleotide
  Target: COL7A1; (-) strand; PAM type: YTN; PAM sequence: TTC
ccatgtgttcatggtcacat

SEQ ID NO: 25151 - DNA, 20 bp, Artificial Sequence
  Description of Artificial Sequence: Synthetic oligonucleotide
  Target: COL7A1; (-) strand; PAM type: YTN; PAM sequence: CTG
agttcccatgtgttcatggt

SEQ ID NO: 25152 - DNA, 20 bp, Artificial Sequence
  Description of Artificial Sequence: Synthetic oligonucleotide
  Target: COL7A1; (-) strand; PAM type: YTN; PAM sequence: TTG
gtcgcatgtctgagttccca

SEQ ID NO: 25153 - DNA, 20 bp, Artificial Sequence
  Description of Artificial Sequence: Synthetic oligonucleotide
  Target: COL7A1; (-) strand; PAM type: YTN; PAM sequence: CTT
ggtcgcatgtctgagttccc

SEQ ID NO: 25154 - DNA, 20 bp, Artificial Sequence
  Description of Artificial Sequence: Synthetic oligonucleotide
  Target: COL7A1; (-) strand; PAM type: YTN; PAM sequence: TTC
ttggtcgcatgtctgagttc

SEQ ID NO: 25155 - DNA, 20 bp, Artificial Sequence
  Description of Artificial Sequence: Synthetic oligonucleotide
  Target: COL7A1; (-) strand; PAM type: YTN; PAM sequence: CTG
tgagccaattcttggtcgca

SEQ ID NO: 25156 - DNA, 20 bp, Artificial Sequence
  Description of Artificial Sequence: Synthetic oligonucleotide
  Target: COL7A1; (-) strand; PAM type: YTN; PAM sequence: CTC
ctgtgagccaattcttggtc

SEQ ID NO: 25157 - DNA, 20 bp, Artificial Sequence
  Description of Artificial Sequence: Synthetic oligonucleotide
  Target: COL7A1; (-) strand; PAM type: YTN; PAM sequence: CTG
agctcctgtgagccaattct

SEQ ID NO: 25158 - DNA, 20 bp, Artificial Sequence
  Description of Artificial Sequence: Synthetic oligonucleotide
  Target: COL7A1; (-) strand; PAM type: YTN; PAM sequence: CTG
agataggccatggtcatgtc

SEQ ID NO: 25159 - DNA, 20 bp, Artificial Sequence
  Description of Artificial Sequence: Synthetic oligonucleotide
  Target: COL7A1; (-) strand; PAM type: YTN; PAM sequence: CTG
tcctgagataggccatggtc

SEQ ID NO: 25160 - DNA, 20 bp, Artificial Sequence
  Description of Artificial Sequence: Synthetic oligonucleotide
  Target: COL7A1; (-) strand; PAM type: YTN; PAM sequence: CTG
tgctgtcctgagataggcca

SEQ ID NO: 25161 - DNA, 20 bp, Artificial Sequence
  Description of Artificial Sequence: Synthetic oligonucleotide
  Target: COL7A1; (-) strand; PAM type: YTN; PAM sequence: CTG
tctgtgctgtcctgagatag

SEQ ID NO: 25162 - DNA, 20 bp, Artificial Sequence
  Description of Artificial Sequence: Synthetic oligonucleotide
  Target: COL7A1; (-) strand; PAM type: YTN; PAM sequence: CTC
tgtctgtgctgtcctgagat

SEQ ID NO: 25163 - DNA, 20 bp, Artificial Sequence
  Description of Artificial Sequence: Synthetic oligonucleotide
  Target: COL7A1; (-) strand; PAM type: YTN; PAM sequence: CTG
agcgtccctctgtctgtgct

SEQ ID NO: 25164 - DNA, 20 bp, Artificial Sequence
  Description of Artificial Sequence: Synthetic oligonucleotide
  Target: COL7A1; (-) strand; PAM type: YTN; PAM sequence: CTA
tggtagtatctgagcgtccc

SEQ ID NO: 25165 - DNA, 20 bp, Artificial Sequence
  Description of Artificial Sequence: Synthetic oligonucleotide
  Target: COL7A1; (-) strand; PAM type: YTN; PAM sequence: CTG
tctatggtagtatctgagcg

SEQ ID NO: 25166 - DNA, 20 bp, Artificial Sequence
  Description of Artificial Sequence: Synthetic oligonucleotide
  Target: COL7A1; (-) strand; PAM type: YTN; PAM sequence: CTC
ccacctgtctatggtagtat

SEQ ID NO: 25167 - DNA, 20 bp, Artificial Sequence
  Description of Artificial Sequence: Synthetic oligonucleotide
  Target: COL7A1; (-) strand; PAM type: YTN; PAM sequence: CTG
aactcccacctgtctatggt

SEQ ID NO: 25168 - DNA, 20 bp, Artificial Sequence
  Description of Artificial Sequence: Synthetic oligonucleotide
  Target: COL7A1; (-) strand; PAM type: YTN; PAM sequence: CTG
tgccatgcctgaactcccac

SEQ ID NO: 25169 - DNA, 20 bp, Artificial Sequence
  Description of Artificial Sequence: Synthetic oligonucleotide
  Target: COL7A1; (-) strand; PAM type: YTN; PAM sequence: CTG
tgcctgtgccatgcctgaac

SEQ ID NO: 25170 - DNA, 20 bp, Artificial Sequence
  Description of Artificial Sequence: Synthetic oligonucleotide
  Target: COL7A1; (-) strand; PAM type: YTN; PAM sequence: CTC
cctgtgcctgtgccatgcct

SEQ ID NO: 25171 - DNA, 20 bp, Artificial Sequence
  Description of Artificial Sequence: Synthetic oligonucleotide
  Target: COL7A1; (-) strand; PAM type: YTN; PAM sequence: CTC
gcgtgtgggctccctgtgcc

SEQ ID NO: 25172 - DNA, 20 bp, Artificial Sequence
  Description of Artificial Sequence: Synthetic oligonucleotide
  Target: COL7A1; (-) strand; PAM type: YTN; PAM sequence: CTG
cactcgcgtgtgggctccct

SEQ ID NO: 25173 - DNA, 20 bp, Artificial Sequence
  Description of Artificial Sequence: Synthetic oligonucleotide
  Target: COL7A1; (-) strand; PAM type: YTN; PAM sequence: CTG
tggagccagatgtctgcact

SEQ ID NO: 25174 - DNA, 20 bp, Artificial Sequence
  Description of Artificial Sequence: Synthetic oligonucleotide
  Target: COL7A1; (-) strand; PAM type: YTN; PAM sequence: CTC
acgtctgtggagccagatgt

SEQ ID NO: 25175 - DNA, 20 bp, Artificial Sequence
  Description of Artificial Sequence: Synthetic oligonucleotide
  Target: COL7A1; (-) strand; PAM type: YTN; PAM sequence: CTG
agcgcccgtgtgtccgcact

SEQ ID NO: 25176 - DNA, 20 bp, Artificial Sequence
  Description of Artificial Sequence: Synthetic oligonucleotide
  Target: COL7A1; (-) strand; PAM type: YTN; PAM sequence: CTC
tgagcgcccgtgtgtccgca

SEQ ID NO: 25177 - DNA, 20 bp, Artificial Sequence
  Description of Artificial Sequence: Synthetic oligonucleotide
  Target: COL7A1; (-) strand; PAM type: YTN; PAM sequence: TTC
ccctctgagcgcccgtgtgt

SEQ ID NO: 25178 - DNA, 20 bp, Artificial Sequence
  Description of Artificial Sequence: Synthetic oligonucleotide
  Target: COL7A1; (-) strand; PAM type: YTN; PAM sequence: TTG
gggttcccctctgagcgccc

SEQ ID NO: 25179 - DNA, 20 bp, Artificial Sequence
  Description of Artificial Sequence: Synthetic oligonucleotide
  Target: COL7A1; (-) strand; PAM type: YTN; PAM sequence: CTA
cccgggagtggacgtgttgg

SEQ ID NO: 25180 - DNA, 20 bp, Artificial Sequence
  Description of Artificial Sequence: Synthetic oligonucleotide
  Target: COL7A1; (-) strand; PAM type: YTN; PAM sequence: CTC
tacccgggagtggacgtgtt

SEQ ID NO: 25181 - DNA, 20 bp, Artificial Sequence
  Description of Artificial Sequence: Synthetic oligonucleotide
  Target: COL7A1; (-) strand; PAM type: YTN; PAM sequence: CTG
ctctacccgggagtggacgt

SEQ ID NO: 25182 - DNA, 20 bp, Artificial Sequence
  Description of Artificial Sequence: Synthetic oligonucleotide
  Target: COL7A1; (-) strand; PAM type: YTN; PAM sequence: CTG
tggccatgcctgctctaccc

SEQ ID NO: 25183 - DNA, 20 bp, Artificial Sequence
  Description of Artificial Sequence: Synthetic oligonucleotide
  Target: COL7A1; (-) strand; PAM type: YTN; PAM sequence: TTC
agcctgtggccatgcctgct

SEQ ID NO: 25184 - DNA, 20 bp, Artificial Sequence
  Description of Artificial Sequence: Synthetic oligonucleotide
  Target: COL7A1; (-) strand; PAM type: YTN; PAM sequence: CTG
ccagcgttcagcctgtggcc

SEQ ID NO: 25185 - DNA, 20 bp, Artificial Sequence
  Description of Artificial Sequence: Synthetic oligonucleotide
  Target: COL7A1; (-) strand; PAM type: YTN; PAM sequence: CTG
gctgccagcgttcagcctgt

SEQ ID NO: 25186 - DNA, 20 bp, Artificial Sequence
  Description of Artificial Sequence: Synthetic oligonucleotide
  Target: COL7A1; (-) strand; PAM type: YTN; PAM sequence: CTG
cccctggctgccagcgttca

SEQ ID NO: 25187 - DNA, 20 bp, Artificial Sequence
  Description of Artificial Sequence: Synthetic oligonucleotide
  Target: COL7A1; (-) strand; PAM type: YTN; PAM sequence: TTC
ccctgcccctggctgccagc

SEQ ID NO: 25188 - DNA, 20 bp, Artificial Sequence
  Description of Artificial Sequence: Synthetic oligonucleotide
  Target: COL7A1; (-) strand; PAM type: YTN; PAM sequence: TTT
cccctgcccctggctgccag

SEQ ID NO: 25189 - DNA, 20 bp, Artificial Sequence
  Description of Artificial Sequence: Synthetic oligonucleotide
  Target: COL7A1; (-) strand; PAM type: YTN; PAM sequence: CTT
tcccctgcccctggctgcca

SEQ ID NO: 25190 - DNA, 20 bp, Artificial Sequence
  Description of Artificial Sequence: Synthetic oligonucleotide
  Target: COL7A1; (-) strand; PAM type: YTN; PAM sequence: CTC
ctttcccctgcccctggctg

SEQ ID NO: 25191 - DNA, 20 bp, Artificial Sequence
  Description of Artificial Sequence: Synthetic oligonucleotide
  Target: COL7A1; (-) strand; PAM type: YTN; PAM sequence: TTA
caatcctcctttcccctgcc

SEQ ID NO: 25192 - DNA, 20 bp, Artificial Sequence
  Description of Artificial Sequence: Synthetic oligonucleotide
  Target: COL7A1; (-) strand; PAM type: YTN; PAM sequence: TTT
acaatcctcctttcccctgc

SEQ ID NO: 25193 - DNA, 20 bp, Artificial Sequence
  Description of Artificial Sequence: Synthetic oligonucleotide
  Target: COL7A1; (-) strand; PAM type: YTN; PAM sequence: CTG
tgtttacaatcctcctttcc

SEQ ID NO: 25194 - DNA, 20 bp, Artificial Sequence
  Description of Artificial Sequence: Synthetic oligonucleotide
  Target: COL7A1; (-) strand; PAM type: YTN; PAM sequence: TTG
gtcctgtgtttacaatcctc

SEQ ID NO: 25195 - DNA, 20 bp, Artificial Sequence
  Description of Artificial Sequence: Synthetic oligonucleotide
  Target: COL7A1; (-) strand; PAM type: YTN; PAM sequence: CTT
ggtcctgtgtttacaatcct

SEQ ID NO: 25196 - DNA, 20 bp, Artificial Sequence
  Description of Artificial Sequence: Synthetic oligonucleotide
  Target: COL7A1; (-) strand; PAM type: YTN; PAM sequence: CTC
cttggtcctgtgtttacaat

SEQ ID NO: 25197 - DNA, 20 bp, Artificial Sequence
  Description of Artificial Sequence: Synthetic oligonucleotide
  Target: COL7A1; (-) strand; PAM type: YTN; PAM sequence: CTC
tccttggtcctgtgtttaca

SEQ ID NO: 25198 - DNA, 20 bp, Artificial Sequence
  Description of Artificial Sequence: Synthetic oligonucleotide
  Target: COL7A1; (-) strand; PAM type: YTN; PAM sequence: TTG
tgaacctctccttggtcctg

SEQ ID NO: 25199 - DNA, 20 bp, Artificial Sequence
  Description of Artificial Sequence: Synthetic oligonucleotide
  Target: COL7A1; (-) strand; PAM type: YTN; PAM sequence: CTT
gtgaacctctccttggtcct

SEQ ID NO: 25200 - DNA, 20 bp, Artificial Sequence
  Description of Artificial Sequence: Synthetic oligonucleotide
  Target: COL7A1; (-) strand; PAM type: YTN; PAM sequence: TTC
ttgtgaacctctccttggtc

SEQ ID NO: 25201 - DNA, 20 bp, Artificial Sequence
  Description of Artificial Sequence: Synthetic oligonucleotide
  Target: COL7A1; (-) strand; PAM type: YTN; PAM sequence: CTG
agttcttgtgaacctctcct

SEQ ID NO: 25202 - DNA, 20 bp, Artificial Sequence
  Description of Artificial Sequence: Synthetic oligonucleotide
  Target: COL7A1; (-) strand; PAM type: YTN; PAM sequence: CTC
ccagatcccaggacacacct

SEQ ID NO: 25203 - DNA, 20 bp, Artificial Sequence
  Description of Artificial Sequence: Synthetic oligonucleotide
  Target: COL7A1; (-) strand; PAM type: YTN; PAM sequence: CTG
atctcccagatcccaggaca

SEQ ID NO: 25204 - DNA, 20 bp, Artificial Sequence
  Description of Artificial Sequence: Synthetic oligonucleotide
  Target: COL7A1; (-) strand; PAM type: YTN; PAM sequence: CTG
gtctgatctcccagatccca

SEQ ID NO: 25205 - DNA, 20 bp, Artificial Sequence
  Description of Artificial Sequence: Synthetic oligonucleotide
  Target: COL7A1; (-) strand; PAM type: YTN; PAM sequence: CTC
tggtctgatctcccagatcc

SEQ ID NO: 25206 - DNA, 20 bp, Artificial Sequence
  Description of Artificial Sequence: Synthetic oligonucleotide
  Target: COL7A1; (-) strand; PAM type: YTN; PAM sequence: CTG
ggcacacgtgtgctctggtc

SEQ ID NO: 25207 - DNA, 20 bp, Artificial Sequence
  Description of Artificial Sequence: Synthetic oligonucleotide
  Target: COL7A1; (-) strand; PAM type: YTN; PAM sequence: CTC
accacatctgggcacacgtg

SEQ ID NO: 25208 - DNA, 20 bp, Artificial Sequence
  Description of Artificial Sequence: Synthetic oligonucleotide
  Target: COL7A1; (-) strand; PAM type: YTN; PAM sequence: TTC
tcaccacatctgggcacacg

SEQ ID NO: 25209 - DNA, 20 bp, Artificial Sequence
  Description of Artificial Sequence: Synthetic oligonucleotide
  Target: COL7A1; (-) strand; PAM type: YTN; PAM sequence: TTT
ctcaccacatctgggcacac

SEQ ID NO: 25210 - DNA, 20 bp, Artificial Sequence
  Description of Artificial Sequence: Synthetic oligonucleotide
  Target: COL7A1; (-) strand; PAM type: YTN; PAM sequence: CTG
tttctcaccacatctgggca

SEQ ID NO: 25211 - DNA, 20 bp, Artificial Sequence
  Description of Artificial Sequence: Synthetic oligonucleotide
  Target: COL7A1; (-) strand; PAM type: YTN; PAM sequence: TTG
gtctgtttctcaccacatct

SEQ ID NO: 25212 - DNA, 20 bp, Artificial Sequence
  Description of Artificial Sequence: Synthetic oligonucleotide
  Target: COL7A1; (-) strand; PAM type: YTN; PAM sequence: CTT
ggtctgtttctcaccacatc

SEQ ID NO: 25213 - DNA, 20 bp, Artificial Sequence
  Description of Artificial Sequence: Synthetic oligonucleotide
  Target: COL7A1; (-) strand; PAM type: YTN; PAM sequence: CTG
tgtgcccatccttggtctgt

SEQ ID NO: 25214 - DNA, 20 bp, Artificial Sequence
  Description of Artificial Sequence: Synthetic oligonucleotide
  Target: COL7A1; (-) strand; PAM type: YTN; PAM sequence: TTC
tgtgtgcccatccttggtct

SEQ ID NO: 25215 - DNA, 20 bp, Artificial Sequence
  Description of Artificial Sequence: Synthetic oligonucleotide
  Target: COL7A1; (-) strand; PAM type: YTN; PAM sequence: CTT
ctgtgtgcccatccttggtc

SEQ ID NO: 25216 - DNA, 20 bp, Artificial Sequence
  Description of Artificial Sequence: Synthetic oligonucleotide
  Target: COL7A1; (-) strand; PAM type: YTN; PAM sequence: TTG
gcttctgtgtgcccatcctt

SEQ ID NO: 25217 - DNA, 20 bp, Artificial Sequence
  Description of Artificial Sequence: Synthetic oligonucleotide
  Target: COL7A1; (-) strand; PAM type: YTN; PAM sequence: CTT
ggcttctgtgtgcccatcct

SEQ ID NO: 25218 - DNA, 20 bp, Artificial Sequence
  Description of Artificial Sequence: Synthetic oligonucleotide
  Target: COL7A1; (-) strand; PAM type: YTN; PAM sequence: CTG
tcttggcttctgtgtgccca

SEQ ID NO: 25219 - DNA, 20 bp, Artificial Sequence
  Description of Artificial Sequence: Synthetic oligonucleotide
  Target: COL7A1; (-) strand; PAM type: YTN; PAM sequence: CTG
ggggccctgtcttggcttct

SEQ ID NO: 25220 - DNA, 20 bp, Artificial Sequence
  Description of Artificial Sequence: Synthetic oligonucleotide
  Target: COL7A1; (-) strand; PAM type: YTN; PAM sequence: CTC
tgggggccctgtcttggctt

SEQ ID NO: 25221 - DNA, 20 bp, Artificial Sequence
  Description of Artificial Sequence: Synthetic oligonucleotide
  Target: COL7A1; (-) strand; PAM type: YTN; PAM sequence: CTG
agctctgggggccctgtctt

SEQ ID NO: 25222 - DNA, 20 bp, Artificial Sequence
  Description of Artificial Sequence: Synthetic oligonucleotide
  Target: COL7A1; (-) strand; PAM type: YTN; PAM sequence: CTC
tgagctctgggggccctgtc

SEQ ID NO: 25223 - DNA, 20 bp, Artificial Sequence
  Description of Artificial Sequence: Synthetic oligonucleotide
  Target: COL7A1; (-) strand; PAM type: YTN; PAM sequence: TTC
cacactctgagctctggggg

SEQ ID NO: 25224 - DNA, 20 bp, Artificial Sequence
  Description of Artificial Sequence: Synthetic oligonucleotide
  Target: COL7A1; (-) strand; PAM type: YTN; PAM sequence: CTT
ccacactctgagctctgggg

SEQ ID NO: 25225 - DNA, 20 bp, Artificial Sequence
  Description of Artificial Sequence: Synthetic oligonucleotide
  Target: COL7A1; (-) strand; PAM type: YTN; PAM sequence: CTG
tcggcttccacactctgagc

SEQ ID NO: 25226 - DNA, 20 bp, Artificial Sequence
  Description of Artificial Sequence: Synthetic oligonucleotide
  Target: COL7A1; (-) strand; PAM type: YTN; PAM sequence: CTG
gatcacagggagccacacac

SEQ ID NO: 25227 - DNA, 20 bp, Artificial Sequence
  Description of Artificial Sequence: Synthetic oligonucleotide
  Target: COL7A1; (-) strand; PAM type: YTN; PAM sequence: CTC
tggatcacagggagccacac

SEQ ID NO: 25228 - DNA, 20 bp, Artificial Sequence
  Description of Artificial Sequence: Synthetic oligonucleotide
  Target: COL7A1; (-) strand; PAM type: YTN; PAM sequence: CTC
tctggatcacagggagccac

SEQ ID NO: 25229 - DNA, 20 bp, Artificial Sequence
  Description of Artificial Sequence: Synthetic oligonucleotide
  Target: COL7A1; (-) strand; PAM type: YTN; PAM sequence: CTG
ctctctggatcacagggagc

SEQ ID NO: 25230 - DNA, 20 bp, Artificial Sequence
  Description of Artificial Sequence: Synthetic oligonucleotide
  Target: COL7A1; (-) strand; PAM type: YTN; PAM sequence: CTG
catgtcccaacatccaggag

SEQ ID NO: 25231 - DNA, 20 bp, Artificial Sequence
  Description of Artificial Sequence: Synthetic oligonucleotide
  Target: COL7A1; (-) strand; PAM type: YTN; PAM sequence: CTG
agtcgggctgcatgtcccaa

SEQ ID NO: 25232 - DNA, 20 bp, Artificial Sequence
  Description of Artificial Sequence: Synthetic oligonucleotide
  Target: COL7A1; (-) strand; PAM type: YTN; PAM sequence: CTG
agcccctgagtcgggctgca

SEQ ID NO: 25233 - DNA, 20 bp, Artificial Sequence
  Description of Artificial Sequence: Synthetic oligonucleotide
  Target: COL7A1; (-) strand; PAM type: YTN; PAM sequence: TTG
ggccggggcacatgtctgag

SEQ ID NO: 25234 - DNA, 20 bp, Artificial Sequence
  Description of Artificial Sequence: Synthetic oligonucleotide
  Target: COL7A1; (-) strand; PAM type: YTN; PAM sequence: CTT
gggccggggcacatgtctga

SEQ ID NO: 25235 - DNA, 20 bp, Artificial Sequence
  Description of Artificial Sequence: Synthetic oligonucleotide
  Target: COL7A1; (-) strand; PAM type: YTN; PAM sequence: CTC
ttgggccggggcacatgtct

SEQ ID NO: 25236 - DNA, 20 bp, Artificial Sequence
  Description of Artificial Sequence: Synthetic oligonucleotide
  Target: COL7A1; (-) strand; PAM type: YTN; PAM sequence: CTG
aggagtgtgatggcgggcat

SEQ ID NO: 25237 - DNA, 20 bp, Artificial Sequence
  Description of Artificial Sequence: Synthetic oligonucleotide
  Target: COL7A1; (-) strand; PAM type: YTN; PAM sequence: CTG
gcctgaggagtgtgatggcg

SEQ ID NO: 25238 - DNA, 20 bp, Artificial Sequence
  Description of Artificial Sequence: Synthetic oligonucleotide
  Target: COL7A1; (-) strand; PAM type: YTN; PAM sequence: CTA
ggcaagggcgagcctggcct

SEQ ID NO: 25239 - DNA, 20 bp, Artificial Sequence
  Description of Artificial Sequence: Synthetic oligonucleotide
  Target: COL7A1; (-) strand; PAM type: YTN; PAM sequence: CTG
gggaagatgtgagtccgggg

SEQ ID NO: 25240 - DNA, 20 bp, Artificial Sequence
  Description of Artificial Sequence: Synthetic oligonucleotide
  Target: COL7A1; (-) strand; PAM type: YTN; PAM sequence: CTG
gccgtgcaggggagcccgga

SEQ ID NO: 25241 - DNA, 20 bp, Artificial Sequence
  Description of Artificial Sequence: Synthetic oligonucleotide
  Target: COL7A1; (-) strand; PAM type: YTN; PAM sequence: CTG
tgcagggtgaagctggccgt

SEQ ID NO: 25242 - DNA, 20 bp, Artificial Sequence
  Description of Artificial Sequence: Synthetic oligonucleotide
  Target: COL7A1; (-) strand; PAM type: YTN; PAM sequence: TTC
tgtgcagggtgaagctggcc

SEQ ID NO: 25243 - DNA, 20 bp, Artificial Sequence
  Description of Artificial Sequence: Synthetic oligonucleotide
  Target: COL7A1; (-) strand; PAM type: YTN; PAM sequence: CTG
ccattctgtgcagggtgaag

SEQ ID NO: 25244 - DNA, 20 bp, Artificial Sequence
  Description of Artificial Sequence: Synthetic oligonucleotide
  Target: COL7A1; (-) strand; PAM type: YTN; PAM sequence: CTC
acctgccattctgtgcaggg

SEQ ID NO: 25245 - DNA, 20 bp, Artificial Sequence
  Description of Artificial Sequence: Synthetic oligonucleotide
  Target: COL7A1; (-) strand; PAM type: YTN; PAM sequence: CTC
agtccagacacccctcacct

SEQ ID NO: 25246 - DNA, 20 bp, Artificial Sequence
  Description of Artificial Sequence: Synthetic oligonucleotide
  Target: COL7A1; (-) strand; PAM type: YTN; PAM sequence: CTG
agcagagaaggctcagtcca

SEQ ID NO: 25247 - DNA, 20 bp, Artificial Sequence
  Description of Artificial Sequence: Synthetic oligonucleotide
  Target: COL7A1; (-) strand; PAM type: YTN; PAM sequence: CTA
ctgagcagagaaggctcagt

SEQ ID NO: 25248 - DNA, 20 bp, Artificial Sequence
  Description of Artificial Sequence: Synthetic oligonucleotide
  Target: COL7A1; (-) strand; PAM type: YTN; PAM sequence: CTG
actactgagcagagaaggct

SEQ ID NO: 25249 - DNA, 20 bp, Artificial Sequence
  Description of Artificial Sequence: Synthetic oligonucleotide
  Target: COL7A1; (-) strand; PAM type: YTN; PAM sequence: CTG
gggcctgactactgagcaga

SEQ ID NO: 25250 - DNA, 20 bp, Artificial Sequence
  Description of Artificial Sequence: Synthetic oligonucleotide
  Target: COL7A1; (-) strand; PAM type: YTN; PAM sequence: TTG
gccctggggcctgactactg

SEQ ID NO: 25251 - DNA, 20 bp, Artificial Sequence
  Description of Artificial Sequence: Synthetic oligonucleotide
  Target: COL7A1; (-) strand; PAM type: YTN; PAM sequence: CTG
ccagggccgcgaggcgagaa

SEQ ID NO: 25252 - DNA, 20 bp, Artificial Sequence
  Description of Artificial Sequence: Synthetic oligonucleotide
  Target: COL7A1; (-) strand; PAM type: YTN; PAM sequence: CTG
tcaacagggagccaaaggtg

SEQ ID NO: 25253 - DNA, 20 bp, Artificial Sequence
  Description of Artificial Sequence: Synthetic oligonucleotide
  Target: COL7A1; (-) strand; PAM type: YTN; PAM sequence: CTC
tgtcaacagggagccaaagg

SEQ ID NO: 25254 - DNA, 20 bp, Artificial Sequence
  Description of Artificial Sequence: Synthetic oligonucleotide
  Target: COL7A1; (-) strand; PAM type: YTN; PAM sequence: CTG
acctctgtcaacagggagcc

SEQ ID NO: 25255 - DNA, 20 bp, Artificial Sequence
  Description of Artificial Sequence: Synthetic oligonucleotide
  Target: COL7A1; (-) strand; PAM type: YTN; PAM sequence: CTC
ctgacctctgtcaacaggga

SEQ ID NO: 25256 - DNA, 20 bp, Artificial Sequence
  Description of Artificial Sequence: Synthetic oligonucleotide
  Target: COL7A1; (-) strand; PAM type: YTN; PAM sequence: TTG
cctcctgacctctgtcaaca

SEQ ID NO: 25257 - DNA, 20 bp, Artificial Sequence
  Description of Artificial Sequence: Synthetic oligonucleotide
  Target: COL7A1; (-) strand; PAM type: YTN; PAM sequence: CTG
tgttgcctcctgacctctgt

SEQ ID NO: 25258 - DNA, 20 bp, Artificial Sequence
  Description of Artificial Sequence: Synthetic oligonucleotide
  Target: COL7A1; (-) strand; PAM type: YTN; PAM sequence: CTG
atgcctgtgttgcctcctga

SEQ ID NO: 25259 - DNA, 20 bp, Artificial Sequence
  Description of Artificial Sequence: Synthetic oligonucleotide
  Target: COL7A1; (-) strand; PAM type: YTN; PAM sequence: CTG
tgactgatgcctgtgttgcc

SEQ ID NO: 25260 - DNA, 20 bp, Artificial Sequence
  Description of Artificial Sequence: Synthetic oligonucleotide
  Target: COL7A1; (-) strand; PAM type: YTN; PAM sequence: TTC
tgtgactgatgcctgtgttg

SEQ ID NO: 25261 - DNA, 20 bp, Artificial Sequence
  Description of Artificial Sequence: Synthetic oligonucleotide
  Target: COL7A1; (-) strand; PAM type: YTN; PAM sequence: TTT
ctgtgactgatgcctgtgtt

SEQ ID NO: 25262 - DNA, 20 bp, Artificial Sequence
  Description of Artificial Sequence: Synthetic oligonucleotide
  Target: COL7A1; (-) strand; PAM type: YTN; PAM sequence: CTT
tctgtgactgatgcctgtgt

SEQ ID NO: 25263 - DNA, 20 bp, Artificial Sequence
  Description of Artificial Sequence: Synthetic oligonucleotide
  Target: COL7A1; (-) strand; PAM type: YTN; PAM sequence: CTC
atctttctgtgactgatgcc

SEQ ID NO: 25264 - DNA, 20 bp, Artificial Sequence
  Description of Artificial Sequence: Synthetic oligonucleotide
  Target: COL7A1; (-) strand; PAM type: YTN; PAM sequence: CTC
cggagtctcatctttctgtg

SEQ ID NO: 25265 - DNA, 20 bp, Artificial Sequence
  Description of Artificial Sequence: Synthetic oligonucleotide
  Target: COL7A1; (-) strand; PAM type: YTN; PAM sequence: CTC
cctccggagtctcatctttc

SEQ ID NO: 25266 - DNA, 20 bp, Artificial Sequence
  Description of Artificial Sequence: Synthetic oligonucleotide
  Target: COL7A1; (-) strand; PAM type: YTN; PAM sequence: CTG
gccccatgcctccctccgga

SEQ ID NO: 25267 - DNA, 20 bp, Artificial Sequence
  Description of Artificial Sequence: Synthetic oligonucleotide
  Target: COL7A1; (-) strand; PAM type: YTN; PAM sequence: CTC
tggccccatgcctccctccg

SEQ ID NO: 25268 - DNA, 20 bp, Artificial Sequence
  Description of Artificial Sequence: Synthetic oligonucleotide
  Target: COL7A1; (-) strand; PAM type: YTN; PAM sequence: TTA
agctctggccccatgcctcc

SEQ ID NO: 25269 - DNA, 20 bp, Artificial Sequence
  Description of Artificial Sequence: Synthetic oligonucleotide
  Target: COL7A1; (-) strand; PAM type: YTN; PAM sequence: TTT
aagctctggccccatgcctc

SEQ ID NO: 25270 - DNA, 20 bp, Artificial Sequence
  Description of Artificial Sequence: Synthetic oligonucleotide
  Target: COL7A1; (-) strand; PAM type: YTN; PAM sequence: TTC
atagtagaccgcatatttaa

SEQ ID NO: 25271 - DNA, 20 bp, Artificial Sequence
  Description of Artificial Sequence: Synthetic oligonucleotide
  Target: COL7A1; (-) strand; PAM type: YTN; PAM sequence: TTT
catagtagaccgcatattta

SEQ ID NO: 25272 - DNA, 20 bp, Artificial Sequence
  Description of Artificial Sequence: Synthetic oligonucleotide
  Target: COL7A1; (-) strand; PAM type: YTN; PAM sequence: CTT
tcatagtagaccgcatattt

SEQ ID NO: 25273 - DNA, 20 bp, Artificial Sequence
  Description of Artificial Sequence: Synthetic oligonucleotide
  Target: COL7A1; (-) strand; PAM type: YTN; PAM sequence: CTC
agctttcatagtagaccgca

SEQ ID NO: 25274 - DNA, 20 bp, Artificial Sequence
  Description of Artificial Sequence: Synthetic oligonucleotide
  Target: COL7A1; (-) strand; PAM type: YTN; PAM sequence: CTC
atgaccctcagctttcatag

SEQ ID NO: 25275 - DNA, 20 bp, Artificial Sequence
  Description of Artificial Sequence: Synthetic oligonucleotide
  Target: COL7A1; (-) strand; PAM type: YTN; PAM sequence: TTA
cccaccctcatgaccctcag

SEQ ID NO: 25276 - DNA, 20 bp, Artificial Sequence
  Description of Artificial Sequence: Synthetic oligonucleotide
  Target: COL7A1; (-) strand; PAM type: YTN; PAM sequence: TTT
acccaccctcatgaccctca

SEQ ID NO: 25277 - DNA, 20 bp, Artificial Sequence
  Description of Artificial Sequence: Synthetic oligonucleotide
  Target: COL7A1; (-) strand; PAM type: YTN; PAM sequence: TTC
gacccatagtttacccaccc

SEQ ID NO: 25278 - DNA, 20 bp, Artificial Sequence
  Description of Artificial Sequence: Synthetic oligonucleotide
  Target: COL7A1; (-) strand; PAM type: YTN; PAM sequence: CTT
cgacccatagtttacccacc

SEQ ID NO: 25279 - DNA, 20 bp, Artificial Sequence
  Description of Artificial Sequence: Synthetic oligonucleotide
  Target: COL7A1; (-) strand; PAM type: YTN; PAM sequence: CTG
accttcgacccatagtttac

SEQ ID NO: 25280 - DNA, 20 bp, Artificial Sequence
  Description of Artificial Sequence: Synthetic oligonucleotide
  Target: COL7A1; (-) strand; PAM type: YTN; PAM sequence: TTC
tgaccttcgacccatagttt

SEQ ID NO: 25281 - DNA, 20 bp, Artificial Sequence
  Description of Artificial Sequence: Synthetic oligonucleotide
  Target: COL7A1; (-) strand; PAM type: YTN; PAM sequence: CTT
ctgaccttcgacccatagtt

SEQ ID NO: 25282 - DNA, 20 bp, Artificial Sequence
  Description of Artificial Sequence: Synthetic oligonucleotide
  Target: COL7A1; (-) strand; PAM type: YTN; PAM sequence: CTA
acttctgaccttcgacccat

SEQ ID NO: 25283 - DNA, 20 bp, Artificial Sequence
  Description of Artificial Sequence: Synthetic oligonucleotide
  Target: COL7A1; (-) strand; PAM type: YTN; PAM sequence: CTC
cagtggcctaacttctgacc

SEQ ID NO: 25284 - DNA, 20 bp, Artificial Sequence
  Description of Artificial Sequence: Synthetic oligonucleotide
  Target: COL7A1; (-) strand; PAM type: YTN; PAM sequence: CTC
tccagtggcctaacttctga

SEQ ID NO: 25285 - DNA, 20 bp, Artificial Sequence
  Description of Artificial Sequence: Synthetic oligonucleotide
  Target: COL7A1; (-) strand; PAM type: YTN; PAM sequence: CTG
tctctccagtggcctaactt

SEQ ID NO: 25286 - DNA, 20 bp, Artificial Sequence
  Description of Artificial Sequence: Synthetic oligonucleotide
  Target: COL7A1; (-) strand; PAM type: YTN; PAM sequence: CTG
ggggtcctgtctctccagtg

SEQ ID NO: 25287 - DNA, 20 bp, Artificial Sequence
  Description of Artificial Sequence: Synthetic oligonucleotide
  Target: COL7A1; (-) strand; PAM type: YTN; PAM sequence: TTC
tgggggtcctgtctctccag

SEQ ID NO: 25288 - DNA, 20 bp, Artificial Sequence
  Description of Artificial Sequence: Synthetic oligonucleotide
  Target: COL7A1; (-) strand; PAM type: YTN; PAM sequence: CTG
acagcagatgttctgggggt

SEQ ID NO: 25289 - DNA, 20 bp, Artificial Sequence
  Description of Artificial Sequence: Synthetic oligonucleotide
  Target: COL7A1; (-) strand; PAM type: YTN; PAM sequence: TTC
tgacagcagatgttctgggg

SEQ ID NO: 25290 - DNA, 20 bp, Artificial Sequence
  Description of Artificial Sequence: Synthetic oligonucleotide
  Target: COL7A1; (-) strand; PAM type: YTN; PAM sequence: CTT
ctgacagcagatgttctggg

SEQ ID NO: 25291 - DNA, 20 bp, Artificial Sequence
  Description of Artificial Sequence: Synthetic oligonucleotide
  Target: COL7A1; (-) strand; PAM type: YTN; PAM sequence: CTG
gtgggtgagccggtaagtag

SEQ ID NO: 25292 - DNA, 20 bp, Artificial Sequence
  Description of Artificial Sequence: Synthetic oligonucleotide
  Target: COL7A1; (-) strand; PAM type: YTN; PAM sequence: CTG
gagacctggtgggtgagccg

SEQ ID NO: 25293 - DNA, 20 bp, Artificial Sequence
  Description of Artificial Sequence: Synthetic oligonucleotide
  Target: COL7A1; (-) strand; PAM type: YTN; PAM sequence: TTG
ctggagacctggtgggtgag

SEQ ID NO: 25294 - DNA, 20 bp, Artificial Sequence
  Description of Artificial Sequence: Synthetic oligonucleotide
  Target: COL7A1; (-) strand; PAM type: YTN; PAM sequence: CTT
gctggagacctggtgggtga

SEQ ID NO: 25295 - DNA, 20 bp, Artificial Sequence
  Description of Artificial Sequence: Synthetic oligonucleotide
  Target: COL7A1; (-) strand; PAM type: YTN; PAM sequence: CTG
gaggccttgctggagacctg

SEQ ID NO: 25296 - DNA, 20 bp, Artificial Sequence
  Description of Artificial Sequence: Synthetic oligonucleotide
  Target: COL7A1; (-) strand; PAM type: YTN; PAM sequence: TTA
ccagggagcccctggaggcc

SEQ ID NO: 25297 - DNA, 20 bp, Artificial Sequence
  Description of Artificial Sequence: Synthetic oligonucleotide
  Target: COL7A1; (-) strand; PAM type: YTN; PAM sequence: CTT
accagggagcccctggaggc

SEQ ID NO: 25298 - DNA, 20 bp, Artificial Sequence
  Description of Artificial Sequence: Synthetic oligonucleotide
  Target: COL7A1; (-) strand; PAM type: YTN; PAM sequence: CTC
ccccttaccagggagcccct

SEQ ID NO: 25299 - DNA, 20 bp, Artificial Sequence
  Description of Artificial Sequence: Synthetic oligonucleotide
  Target: COL7A1; (-) strand; PAM type: YTN; PAM sequence: CTC
tcccccttaccagggagccc

SEQ ID NO: 25300 - DNA, 20 bp, Artificial Sequence
  Description of Artificial Sequence: Synthetic oligonucleotide
  Target: COL7A1; (-) strand; PAM type: YTN; PAM sequence: CTG
acctctcccccttaccaggg

SEQ ID NO: 25301 - DNA, 20 bp, Artificial Sequence
  Description of Artificial Sequence: Synthetic oligonucleotide
  Target: COL7A1; (-) strand; PAM type: YTN; PAM sequence: CTG
gtgggggccaaggaatccca

SEQ ID NO: 25302 - DNA, 20 bp, Artificial Sequence
  Description of Artificial Sequence: Synthetic oligonucleotide
  Target: COL7A1; (-) strand; PAM type: YTN; PAM sequence: CTG
ccagtgagggggggtcaact

SEQ ID NO: 25303 - DNA, 20 bp, Artificial Sequence
  Description of Artificial Sequence: Synthetic oligonucleotide
  Target: COL7A1; (-) strand; PAM type: YTN; PAM sequence: CTG
gagcaaagggagagaaggtg

SEQ ID NO: 25304 - DNA, 20 bp, Artificial Sequence
  Description of Artificial Sequence: Synthetic oligonucleotide
  Target: COL7A1; (-) strand; PAM type: YTN; PAM sequence: CTC
cctggagcaaagggagagaa

SEQ ID NO: 25305 - DNA, 20 bp, Artificial Sequence
  Description of Artificial Sequence: Synthetic oligonucleotide
  Target: COL7A1; (-) strand; PAM type: YTN; PAM sequence: CTG
tggtcgggctccctggagca

SEQ ID NO: 25306 - DNA, 20 bp, Artificial Sequence
  Description of Artificial Sequence: Synthetic oligonucleotide
  Target: COL7A1; (-) strand; PAM type: YTN; PAM sequence: TTC
cccacaggctgtggtcgggc

SEQ ID NO: 25307 - DNA, 20 bp, Artificial Sequence
  Description of Artificial Sequence: Synthetic oligonucleotide
  Target: COL7A1; (-) strand; PAM type: YTN; PAM sequence: CTA
gcattccccacaggctgtgg

SEQ ID NO: 25308 - DNA, 20 bp, Artificial Sequence
  Description of Artificial Sequence: Synthetic oligonucleotide
  Target: COL7A1; (-) strand; PAM type: YTN; PAM sequence: CTC
actagcattccccacaggct

SEQ ID NO: 25309 - DNA, 20 bp, Artificial Sequence
  Description of Artificial Sequence: Synthetic oligonucleotide
  Target: COL7A1; (-) strand; PAM type: YTN; PAM sequence: TTC
caaatgccatgggggtggca

SEQ ID NO: 25310 - DNA, 20 bp, Artificial Sequence
  Description of Artificial Sequence: Synthetic oligonucleotide
  Target: COL7A1; (-) strand; PAM type: YTN; PAM sequence: TTT
ccaaatgccatgggggtggc

SEQ ID NO: 25311 - DNA, 20 bp, Artificial Sequence
  Description of Artificial Sequence: Synthetic oligonucleotide
  Target: COL7A1; (-) strand; PAM type: YTN; PAM sequence: CTG
tttccaaatgccatgggggt

SEQ ID NO: 25312 - DNA, 20 bp, Artificial Sequence
  Description of Artificial Sequence: Synthetic oligonucleotide
  Target: COL7A1; (-) strand; PAM type: YTN; PAM sequence: CTC
acccacaagcctgtttccaa

SEQ ID NO: 25313 - DNA, 20 bp, Artificial Sequence
  Description of Artificial Sequence: Synthetic oligonucleotide
  Target: COL7A1; (-) strand; PAM type: YTN; PAM sequence: CTG
cctcacccacaagcctgttt

SEQ ID NO: 25314 - DNA, 20 bp, Artificial Sequence
  Description of Artificial Sequence: Synthetic oligonucleotide
  Target: COL7A1; (-) strand; PAM type: YTN; PAM sequence: CTC
tgcctcacccacaagcctgt

SEQ ID NO: 25315 - DNA, 20 bp, Artificial Sequence
  Description of Artificial Sequence: Synthetic oligonucleotide
  Target: COL7A1; (-) strand; PAM type: YTN; PAM sequence: CTC
ctctgcctcacccacaagcc

SEQ ID NO: 25316 - DNA, 20 bp, Artificial Sequence
  Description of Artificial Sequence: Synthetic oligonucleotide
  Target: COL7A1; (-) strand; PAM type: YTN; PAM sequence: CTG
cagcaactcctctgcctcac

SEQ ID NO: 25317 - DNA, 20 bp, Artificial Sequence
  Description of Artificial Sequence: Synthetic oligonucleotide
  Target: COL7A1; (-) strand; PAM type: YTN; PAM sequence: TTC
caccccctgcagcaactcct

SEQ ID NO: 25318 - DNA, 20 bp, Artificial Sequence
  Description of Artificial Sequence: Synthetic oligonucleotide
  Target: COL7A1; (-) strand; PAM type: YTN; PAM sequence: CTT
ccaccccctgcagcaactcc

SEQ ID NO: 25319 - DNA, 20 bp, Artificial Sequence
  Description of Artificial Sequence: Synthetic oligonucleotide
  Target: COL7A1; (-) strand; PAM type: YTN; PAM sequence: CTG
acttccaccccctgcagcaa

SEQ ID NO: 25320 - DNA, 20 bp, Artificial Sequence
  Description of Artificial Sequence: Synthetic oligonucleotide
  Target: COL7A1; (-) strand; PAM type: YTN; PAM sequence: TTG
accctgacttccaccccctg

SEQ ID NO: 25321 - DNA, 20 bp, Artificial Sequence
  Description of Artificial Sequence: Synthetic oligonucleotide
  Target: COL7A1; (-) strand; PAM type: YTN; PAM sequence: TTT
gaccctgacttccaccccct

SEQ ID NO: 25322 - DNA, 20 bp, Artificial Sequence
  Description of Artificial Sequence: Synthetic oligonucleotide
  Target: COL7A1; (-) strand; PAM type: YTN; PAM sequence: CTT
tgaccctgacttccaccccc

SEQ ID NO: 25323 - DNA, 20 bp, Artificial Sequence
  Description of Artificial Sequence: Synthetic oligonucleotide
  Target: COL7A1; (-) strand; PAM type: YTN; PAM sequence: CTG
gacaggtgatctttgaccct

SEQ ID NO: 25324 - DNA, 20 bp, Artificial Sequence
  Description of Artificial Sequence: Synthetic oligonucleotide
  Target: COL7A1; (-) strand; PAM type: YTN; PAM sequence: CTG
gccccacgggggcccctgga

SEQ ID NO: 25325 - DNA, 20 bp, Artificial Sequence
  Description of Artificial Sequence: Synthetic oligonucleotide
  Target: COL7A1; (-) strand; PAM type: YTN; PAM sequence: CTA
aaggagaacctggccccacg

SEQ ID NO: 25326 - DNA, 20 bp, Artificial Sequence
  Description of Artificial Sequence: Synthetic oligonucleotide
  Target: COL7A1; (-) strand; PAM type: YTN; PAM sequence: CTG
tcggacctaaaggagaacct

SEQ ID NO: 25327 - DNA, 20 bp, Artificial Sequence
  Description of Artificial Sequence: Synthetic oligonucleotide
  Target: COL7A1; (-) strand; PAM type: YTN; PAM sequence: CTG
gccctgtcggacctaaagga

SEQ ID NO: 25328 - DNA, 20 bp, Artificial Sequence
  Description of Artificial Sequence: Synthetic oligonucleotide
  Target: COL7A1; (-) strand; PAM type: YTN; PAM sequence: CTG
cctggccctgtcggacctaa

SEQ ID NO: 25329 - DNA, 20 bp, Artificial Sequence
  Description of Artificial Sequence: Synthetic oligonucleotide
  Target: COL7A1; (-) strand; PAM type: YTN; PAM sequence: CTG
ccataggggtcaccaggtct

SEQ ID NO: 25330 - DNA, 20 bp, Artificial Sequence
  Description of Artificial Sequence: Synthetic oligonucleotide
  Target: COL7A1; (-) strand; PAM type: YTN; PAM sequence: CTC
tgccataggggtcaccaggt

SEQ ID NO: 25331 - DNA, 20 bp, Artificial Sequence
  Description of Artificial Sequence: Synthetic oligonucleotide
  Target: COL7A1; (-) strand; PAM type: YTN; PAM sequence: CTG
ctctgccataggggtcacca

SEQ ID NO: 25332 - DNA, 20 bp, Artificial Sequence
  Description of Artificial Sequence: Synthetic oligonucleotide
  Target: COL7A1; (-) strand; PAM type: YTN; PAM sequence: CTC
acgctgctctgccatagggg

SEQ ID NO: 25333 - DNA, 20 bp, Artificial Sequence
  Description of Artificial Sequence: Synthetic oligonucleotide
  Target: COL7A1; (-) strand; PAM type: YTN; PAM sequence: TTC
ctcacgctgctctgccatag

SEQ ID NO: 25334 - DNA, 20 bp, Artificial Sequence
  Description of Artificial Sequence: Synthetic oligonucleotide
  Target: COL7A1; (-) strand; PAM type: YTN; PAM sequence: CTG
agttcctcacgctgctctgc

SEQ ID NO: 25335 - DNA, 20 bp, Artificial Sequence
  Description of Artificial Sequence: Synthetic oligonucleotide
  Target: COL7A1; (-) strand; PAM type: YTN; PAM sequence: CTG
aaatatgaggagtggggcag

SEQ ID NO: 25336 - DNA, 20 bp, Artificial Sequence
  Description of Artificial Sequence: Synthetic oligonucleotide
  Target: COL7A1; (-) strand; PAM type: YTN; PAM sequence: CTG
tgggcctgaaatatgaggag

SEQ ID NO: 25337 - DNA, 20 bp, Artificial Sequence
  Description of Artificial Sequence: Synthetic oligonucleotide
  Target: COL7A1; (-) strand; PAM type: YTN; PAM sequence: CTA
gggtgtggtgcccagctgtg

SEQ ID NO: 25338 - DNA, 20 bp, Artificial Sequence
  Description of Artificial Sequence: Synthetic oligonucleotide
  Target: COL7A1; (-) strand; PAM type: YTN; PAM sequence: CTC
gctagggtgtggtgcccagc

SEQ ID NO: 25339 - DNA, 20 bp, Artificial Sequence
  Description of Artificial Sequence: Synthetic oligonucleotide
  Target: COL7A1; (-) strand; PAM type: YTN; PAM sequence: CTG
ggggcagctcgctagggtgt

SEQ ID NO: 25340 - DNA, 20 bp, Artificial Sequence
  Description of Artificial Sequence: Synthetic oligonucleotide
  Target: COL7A1; (-) strand; PAM type: YTN; PAM sequence: TTC
tgggggcagctcgctagggt

SEQ ID NO: 25341 - DNA, 20 bp, Artificial Sequence
  Description of Artificial Sequence: Synthetic oligonucleotide
  Target: COL7A1; (-) strand; PAM type: YTN; PAM sequence: CTG
gtgtgccagtatgtgttctg

SEQ ID NO: 25342 - DNA, 20 bp, Artificial Sequence
  Description of Artificial Sequence: Synthetic oligonucleotide
  Target: COL7A1; (-) strand; PAM type: YTN; PAM sequence: CTC
agggggagacagggaagccg

SEQ ID NO: 25343 - DNA, 20 bp, Artificial Sequence
  Description of Artificial Sequence: Synthetic oligonucleotide
  Target: COL7A1; (-) strand; PAM type: YTN; PAM sequence: CTC
tcagggggagacagggaagc

SEQ ID NO: 25344 - DNA, 20 bp, Artificial Sequence
  Description of Artificial Sequence: Synthetic oligonucleotide
  Target: COL7A1; (-) strand; PAM type: YTN; PAM sequence: TTC
cctctcagggggagacaggg

SEQ ID NO: 25345 - DNA, 20 bp, Artificial Sequence
  Description of Artificial Sequence: Synthetic oligonucleotide
  Target: COL7A1; (-) strand; PAM type: YTN; PAM sequence: CTT
ccctctcagggggagacagg

SEQ ID NO: 25346 - DNA, 20 bp, Artificial Sequence
  Description of Artificial Sequence: Synthetic oligonucleotide
  Target: COL7A1; (-) strand; PAM type: YTN; PAM sequence: CTC
ttccctctcagggggagaca

SEQ ID NO: 25347 - DNA, 20 bp, Artificial Sequence
  Description of Artificial Sequence: Synthetic oligonucleotide
  Target: COL7A1; (-) strand; PAM type: YTN; PAM sequence: CTG
acagagctcttccctctcag

SEQ ID NO: 25348 - DNA, 20 bp, Artificial Sequence
  Description of Artificial Sequence: Synthetic oligonucleotide
  Target: COL7A1; (-) strand; PAM type: YTN; PAM sequence: CTC
caggggtcaagggtcgacag

SEQ ID NO: 25349 - DNA, 20 bp, Artificial Sequence
  Description of Artificial Sequence: Synthetic oligonucleotide
  Target: COL7A1; (-) strand; PAM type: YTN; PAM sequence: TTG
ggctccaggggtcaagggtc

SEQ ID NO: 25350 - DNA, 20 bp, Artificial Sequence
  Description of Artificial Sequence: Synthetic oligonucleotide
  Target: COL7A1; (-) strand; PAM type: YTN; PAM sequence: CTG
ggggtcaagggttgggctcc

SEQ ID NO: 25351 - DNA, 20 bp, Artificial Sequence
  Description of Artificial Sequence: Synthetic oligonucleotide
  Target: COL7A1; (-) strand; PAM type: YTN; PAM sequence: TTC
tgggggtcaagggttgggct

SEQ ID NO: 25352 - DNA, 20 bp, Artificial Sequence
  Description of Artificial Sequence: Synthetic oligonucleotide
  Target: COL7A1; (-) strand; PAM type: YTN; PAM sequence: CTG
gacaagtggtgagttctggg

SEQ ID NO: 25353 - DNA, 20 bp, Artificial Sequence
  Description of Artificial Sequence: Synthetic oligonucleotide
  Target: COL7A1; (-) strand; PAM type: YTN; PAM sequence: TTG
cctggacaagtggtgagttc

SEQ ID NO: 25354 - DNA, 20 bp, Artificial Sequence
  Description of Artificial Sequence: Synthetic oligonucleotide
  Target: COL7A1; (-) strand; PAM type: YTN; PAM sequence: TTT
gcctggacaagtggtgagtt

SEQ ID NO: 25355 - DNA, 20 bp, Artificial Sequence
  Description of Artificial Sequence: Synthetic oligonucleotide
  Target: COL7A1; (-) strand; PAM type: YTN; PAM sequence: CTC
caggtttgcctggacaagtg

SEQ ID NO: 25356 - DNA, 20 bp, Artificial Sequence
  Description of Artificial Sequence: Synthetic oligonucleotide
  Target: COL7A1; (-) strand; PAM type: YTN; PAM sequence: CTC
cgtcagggtccacaggggtc

SEQ ID NO: 25357 - DNA, 20 bp, Artificial Sequence
  Description of Artificial Sequence: Synthetic oligonucleotide
  Target: COL7A1; (-) strand; PAM type: YTN; PAM sequence: TTC
tccgtcagggtccacagggg

SEQ ID NO: 25358 - DNA, 20 bp, Artificial Sequence
  Description of Artificial Sequence: Synthetic oligonucleotide
  Target: COL7A1; (-) strand; PAM type: YTN; PAM sequence: TTG
ttctccgtcagggtccacag

SEQ ID NO: 25359 - DNA, 20 bp, Artificial Sequence
  Description of Artificial Sequence: Synthetic oligonucleotide
  Target: COL7A1; (-) strand; PAM type: YTN; PAM sequence: CTT
gttctccgtcagggtccaca

SEQ ID NO: 25360 - DNA, 20 bp, Artificial Sequence
  Description of Artificial Sequence: Synthetic oligonucleotide
  Target: COL7A1; (-) strand; PAM type: YTN; PAM sequence: CTG
acatccgacttgttctccgt

SEQ ID NO: 25361 - DNA, 20 bp, Artificial Sequence
  Description of Artificial Sequence: Synthetic oligonucleotide
  Target: COL7A1; (-) strand; PAM type: YTN; PAM sequence: TTG
tcaccctgacatccgacttg

SEQ ID NO: 25362 - DNA, 20 bp, Artificial Sequence
  Description of Artificial Sequence: Synthetic oligonucleotide
  Target: COL7A1; (-) strand; PAM type: YTN; PAM sequence: CTG
tgtccattgtcaccctgaca

SEQ ID NO: 25363 - DNA, 20 bp, Artificial Sequence
  Description of Artificial Sequence: Synthetic oligonucleotide
  Target: COL7A1; (-) strand; PAM type: YTN; PAM sequence: CTC
atgtcgtcctgtgtccattg

SEQ ID NO: 25364 - DNA, 20 bp, Artificial Sequence
  Description of Artificial Sequence: Synthetic oligonucleotide
  Target: COL7A1; (-) strand; PAM type: YTN; PAM sequence: CTC
tcatgtcgtcctgtgtccat

SEQ ID NO: 25365 - DNA, 20 bp, Artificial Sequence
  Description of Artificial Sequence: Synthetic oligonucleotide
  Target: COL7A1; (-) strand; PAM type: YTN; PAM sequence: TTC
tctcatgtcgtcctgtgtcc

SEQ ID NO: 25366 - DNA, 20 bp, Artificial Sequence
  Description of Artificial Sequence: Synthetic oligonucleotide
  Target: COL7A1; (-) strand; PAM type: YTN; PAM sequence: TTG
gggcccatgttctctcatgt

SEQ ID NO: 25367 - DNA, 20 bp, Artificial Sequence
  Description of Artificial Sequence: Synthetic oligonucleotide
  Target: COL7A1; (-) strand; PAM type: YTN; PAM sequence: CTT
ggggcccatgttctctcatg

SEQ ID NO: 25368 - DNA, 20 bp, Artificial Sequence
  Description of Artificial Sequence: Synthetic oligonucleotide
  Target: COL7A1; (-) strand; PAM type: YTN; PAM sequence: CTC
cttggggcccatgttctctc

SEQ ID NO: 25369 - DNA, 20 bp, Artificial Sequence
  Description of Artificial Sequence: Synthetic oligonucleotide
  Target: COL7A1; (-) strand; PAM type: YTN; PAM sequence: TTC
actccttggggcccatgttc

SEQ ID NO: 25370 - DNA, 20 bp, Artificial Sequence
  Description of Artificial Sequence: Synthetic oligonucleotide
  Target: COL7A1; (-) strand; PAM type: YTN; PAM sequence: TTT
cactccttggggcccatgtt

SEQ ID NO: 25371 - DNA, 20 bp, Artificial Sequence
  Description of Artificial Sequence: Synthetic oligonucleotide
  Target: COL7A1; (-) strand; PAM type: YTN; PAM sequence: TTT
tcactccttggggcccatgt

SEQ ID NO: 25372 - DNA, 20 bp, Artificial Sequence
  Description of Artificial Sequence: Synthetic oligonucleotide
  Target: COL7A1; (-) strand; PAM type: YTN; PAM sequence: CTG
tagggacaccgtgttttcac

SEQ ID NO: 25373 - DNA, 20 bp, Artificial Sequence
  Description of Artificial Sequence: Synthetic oligonucleotide
  Target: COL7A1; (-) strand; PAM type: YTN; PAM sequence: CTG
tggcccctgtagggacaccg

SEQ ID NO: 25374 - DNA, 20 bp, Artificial Sequence
  Description of Artificial Sequence: Synthetic oligonucleotide
  Target: COL7A1; (-) strand; PAM type: YTN; PAM sequence: TTG
tggtgagtgagtccctgtgg

SEQ ID NO: 25375 - DNA, 20 bp, Artificial Sequence
  Description of Artificial Sequence: Synthetic oligonucleotide
  Target: COL7A1; (-) strand; PAM type: YTN; PAM sequence: CTT
gtggtgagtgagtccctgtg

SEQ ID NO: 25376 - DNA, 20 bp, Artificial Sequence
  Description of Artificial Sequence: Synthetic oligonucleotide
  Target: COL7A1; (-) strand; PAM type: YTN; PAM sequence: TTC
aggccttgtggtgagtgagt

SEQ ID NO: 25377 - DNA, 20 bp, Artificial Sequence
  Description of Artificial Sequence: Synthetic oligonucleotide
  Target: COL7A1; (-) strand; PAM type: YTN; PAM sequence: CTT
caggccttgtggtgagtgag

SEQ ID NO: 25378 - DNA, 20 bp, Artificial Sequence
  Description of Artificial Sequence: Synthetic oligonucleotide
  Target: COL7A1; (-) strand; PAM type: YTN; PAM sequence: CTG
gaccccccggcccttcaggc

SEQ ID NO: 25379 - DNA, 20 bp, Artificial Sequence
  Description of Artificial Sequence: Synthetic oligonucleotide
  Target: COL7A1; (-) strand; PAM type: YTN; PAM sequence: TTC
ctggaccccccggcccttca

SEQ ID NO: 25380 - DNA, 20 bp, Artificial Sequence
  Description of Artificial Sequence: Synthetic oligonucleotide
  Target: COL7A1; (-) strand; PAM type: YTN; PAM sequence: CTT
cctggaccccccggcccttc

SEQ ID NO: 25381 - DNA, 20 bp, Artificial Sequence
  Description of Artificial Sequence: Synthetic oligonucleotide
  Target: COL7A1; (-) strand; PAM type: YTN; PAM sequence: CTG
tgggacttcctggacccccc

SEQ ID NO: 25382 - DNA, 20 bp, Artificial Sequence
  Description of Artificial Sequence: Synthetic oligonucleotide
  Target: COL7A1; (-) strand; PAM type: YTN; PAM sequence: CTG
gagctgtgggacttcctgga

SEQ ID NO: 25383 - DNA, 20 bp, Artificial Sequence
  Description of Artificial Sequence: Synthetic oligonucleotide
  Target: COL7A1; (-) strand; PAM type: YTN; PAM sequence: CTA
ctggagctgtgggacttcct

SEQ ID NO: 25384 - DNA, 20 bp, Artificial Sequence
  Description of Artificial Sequence: Synthetic oligonucleotide
  Target: COL7A1; (-) strand; PAM type: YTN; PAM sequence: CTG
gacctactggagctgtggga

SEQ ID NO: 25385 - DNA, 20 bp, Artificial Sequence
  Description of Artificial Sequence: Synthetic oligonucleotide
  Target: COL7A1; (-) strand; PAM type: YTN; PAM sequence: CTG
actggacctactggagctgt

SEQ ID NO: 25386 - DNA, 20 bp, Artificial Sequence
  Description of Artificial Sequence: Synthetic oligonucleotide
  Target: COL7A1; (-) strand; PAM type: YTN; PAM sequence: CTC
cagggcctgactggacctac

SEQ ID NO: 25387 - DNA, 20 bp, Artificial Sequence
  Description of Artificial Sequence: Synthetic oligonucleotide
  Target: COL7A1; (-) strand; PAM type: YTN; PAM sequence: TTC
ctccagggcctgactggacc

SEQ ID NO: 25388 - DNA, 20 bp, Artificial Sequence
  Description of Artificial Sequence: Synthetic oligonucleotide
  Target: COL7A1; (-) strand; PAM type: YTN; PAM sequence: CTT
cctccagggcctgactggac

SEQ ID NO: 25389 - DNA, 20 bp, Artificial Sequence
  Description of Artificial Sequence: Synthetic oligonucleotide
  Target: COL7A1; (-) strand; PAM type: YTN; PAM sequence: CTC
ttcctccagggcctgactgg

SEQ ID NO: 25390 - DNA, 20 bp, Artificial Sequence
  Description of Artificial Sequence: Synthetic oligonucleotide
  Target: COL7A1; (-) strand; PAM type: YTN; PAM sequence: TTC
tcttcctccagggcctgact

SEQ ID NO: 25391 - DNA, 20 bp, Artificial Sequence
  Description of Artificial Sequence: Synthetic oligonucleotide
  Target: COL7A1; (-) strand; PAM type: YTN; PAM sequence: TTT
ctcttcctccagggcctgac

SEQ ID NO: 25392 - DNA, 20 bp, Artificial Sequence
  Description of Artificial Sequence: Synthetic oligonucleotide
  Target: COL7A1; (-) strand; PAM type: YTN; PAM sequence: CTT
tctcttcctccagggcctga

SEQ ID NO: 25393 - DNA, 20 bp, Artificial Sequence
  Description of Artificial Sequence: Synthetic oligonucleotide
  Target: COL7A1; (-) strand; PAM type: YTN; PAM sequence: CTG
aactttctcttcctccaggg

SEQ ID NO: 25394 - DNA, 20 bp, Artificial Sequence
  Description of Artificial Sequence: Synthetic oligonucleotide
  Target: COL7A1; (-) strand; PAM type: YTN; PAM sequence: CTG
ccctgaactttctcttcctc

SEQ ID NO: 25395 - DNA, 20 bp, Artificial Sequence
  Description of Artificial Sequence: Synthetic oligonucleotide
  Target: COL7A1; (-) strand; PAM type: YTN; PAM sequence: TTG
gcactgccctgaactttctc

SEQ ID NO: 25396 - DNA, 20 bp, Artificial Sequence
  Description of Artificial Sequence: Synthetic oligonucleotide
  Target: COL7A1; (-) strand; PAM type: YTN; PAM sequence: TTA
gggtcatagggagatgggtg

SEQ ID NO: 25397 - DNA, 20 bp, Artificial Sequence
  Description of Artificial Sequence: Synthetic oligonucleotide
  Target: COL7A1; (-) strand; PAM type: YTN; PAM sequence: CTC
acaggttagggtcataggga

SEQ ID NO: 25398 - DNA, 20 bp, Artificial Sequence
  Description of Artificial Sequence: Synthetic oligonucleotide
  Target: COL7A1; (-) strand; PAM type: YTN; PAM sequence: CTA
gctcacaggttagggtcata

SEQ ID NO: 25399 - DNA, 20 bp, Artificial Sequence
  Description of Artificial Sequence: Synthetic oligonucleotide
  Target: COL7A1; (-) strand; PAM type: YTN; PAM sequence: CTC
caggacgggtgagtggccta

SEQ ID NO: 25400 - DNA, 20 bp, Artificial Sequence
  Description of Artificial Sequence: Synthetic oligonucleotide
  Target: COL7A1; (-) strand; PAM type: YTN; PAM sequence: CTG
gagagacaggacctccagga

SEQ ID NO: 25401 - DNA, 20 bp, Artificial Sequence
  Description of Artificial Sequence: Synthetic oligonucleotide
  Target: COL7A1; (-) strand; PAM type: YTN; PAM sequence: TTG
cagggggagcctggagagac

SEQ ID NO: 25402 - DNA, 20 bp, Artificial Sequence
  Description of Artificial Sequence: Synthetic oligonucleotide
  Target: COL7A1; (-) strand; PAM type: YTN; PAM sequence: TTT
gcagggggagcctggagaga

SEQ ID NO: 25403 - DNA, 20 bp, Artificial Sequence
  Description of Artificial Sequence: Synthetic oligonucleotide
  Target: COL7A1; (-) strand; PAM type: YTN; PAM sequence: TTG
tttgcagggggagcctggag

SEQ ID NO: 25404 - DNA, 20 bp, Artificial Sequence
  Description of Artificial Sequence: Synthetic oligonucleotide
  Target: COL7A1; (-) strand; PAM type: YTN; PAM sequence: CTG
ggttgtttgcagggggagcc

SEQ ID NO: 25405 - DNA, 20 bp, Artificial Sequence
  Description of Artificial Sequence: Synthetic oligonucleotide
  Target: COL7A1; (-) strand; PAM type: YTN; PAM sequence: CTC
tgggttgtttgcagggggag

SEQ ID NO: 25406 - DNA, 20 bp, Artificial Sequence
  Description of Artificial Sequence: Synthetic oligonucleotide
  Target: COL7A1; (-) strand; PAM type: YTN; PAM sequence: CTC
atgcagtctctgggttgttt

SEQ ID NO: 25407 - DNA, 20 bp, Artificial Sequence
  Description of Artificial Sequence: Synthetic oligonucleotide
  Target: COL7A1; (-) strand; PAM type: YTN; PAM sequence: CTG
ctcatgcagtctctgggttg

SEQ ID NO: 25408 - DNA, 20 bp, Artificial Sequence
  Description of Artificial Sequence: Synthetic oligonucleotide
  Target: COL7A1; (-) strand; PAM type: YTN; PAM sequence: CTC
tgctcatgcagtctctgggt

SEQ ID NO: 25409 - DNA, 20 bp, Artificial Sequence
  Description of Artificial Sequence: Synthetic oligonucleotide
  Target: COL7A1; (-) strand; PAM type: YTN; PAM sequence: CTG
gccacgtgggctctgctcat

SEQ ID NO: 25410 - DNA, 20 bp, Artificial Sequence
  Description of Artificial Sequence: Synthetic oligonucleotide
  Target: COL7A1; (-) strand; PAM type: YTN; PAM sequence: CTC
caggagccctggccacgtgg

SEQ ID NO: 25411 - DNA, 20 bp, Artificial Sequence
  Description of Artificial Sequence: Synthetic oligonucleotide
  Target: COL7A1; (-) strand; PAM type: YTN; PAM sequence: CTG
caatgaggatgagctccagg

SEQ ID NO: 25412 - DNA, 20 bp, Artificial Sequence
  Description of Artificial Sequence: Synthetic oligonucleotide
  Target: COL7A1; (-) strand; PAM type: YTN; PAM sequence: CTC
ctgcaatgaggatgagctcc

SEQ ID NO: 25413 - DNA, 20 bp, Artificial Sequence
  Description of Artificial Sequence: Synthetic oligonucleotide
  Target: COL7A1; (-) strand; PAM type: YTN; PAM sequence: CTG
tcatctcctgcaatgaggat

SEQ ID NO: 25414 - DNA, 20 bp, Artificial Sequence
  Description of Artificial Sequence: Synthetic oligonucleotide
  Target: COL7A1; (-) strand; PAM type: YTN; PAM sequence: CTG
ggctgtcatctcctgcaatg

SEQ ID NO: 25415 - DNA, 20 bp, Artificial Sequence
  Description of Artificial Sequence: Synthetic oligonucleotide
  Target: COL7A1; (-) strand; PAM type: YTN; PAM sequence: CTC
ctgggctgtcatctcctgca

SEQ ID NO: 25416 - DNA, 20 bp, Artificial Sequence
  Description of Artificial Sequence: Synthetic oligonucleotide
  Target: COL7A1; (-) strand; PAM type: YTN; PAM sequence: CTG
gggtagtgtgcgccaacctc

SEQ ID NO: 25417 - DNA, 20 bp, Artificial Sequence
  Description of Artificial Sequence: Synthetic oligonucleotide
  Target: COL7A1; (-) strand; PAM type: YTN; PAM sequence: CTG
tgtccatgcctggggtagtg

SEQ ID NO: 25418 - DNA, 20 bp, Artificial Sequence
  Description of Artificial Sequence: Synthetic oligonucleotide
  Target: COL7A1; (-) strand; PAM type: YTN; PAM sequence: TTC
aagctgtgtccatgcctggg

SEQ ID NO: 25419 - DNA, 20 bp, Artificial Sequence
  Description of Artificial Sequence: Synthetic oligonucleotide
  Target: COL7A1; (-) strand; PAM type: YTN; PAM sequence: CTT
caagctgtgtccatgcctgg

SEQ ID NO: 25420 - DNA, 20 bp, Artificial Sequence
  Description of Artificial Sequence: Synthetic oligonucleotide
  Target: COL7A1; (-) strand; PAM type: YTN; PAM sequence: CTC
cttcaagctgtgtccatgcc

SEQ ID NO: 25421 - DNA, 20 bp, Artificial Sequence
  Description of Artificial Sequence: Synthetic oligonucleotide
  Target: COL7A1; (-) strand; PAM type: YTN; PAM sequence: CTA
ggtgtgtggataggaggagg

SEQ ID NO: 25422 - DNA, 20 bp, Artificial Sequence
  Description of Artificial Sequence: Synthetic oligonucleotide
  Target: COL7A1; (-) strand; PAM type: YTN; PAM sequence: CTG
aaggtgagtctaggtgtgtg

SEQ ID NO: 25423 - DNA, 20 bp, Artificial Sequence
  Description of Artificial Sequence: Synthetic oligonucleotide
  Target: COL7A1; (-) strand; PAM type: YTN; PAM sequence: CTG
gcctgaaggtgagtctaggt

SEQ ID NO: 25424 - DNA, 20 bp, Artificial Sequence
  Description of Artificial Sequence: Synthetic oligonucleotide
  Target: COL7A1; (-) strand; PAM type: YTN; PAM sequence: TTC
tggcctgaaggtgagtctag

SEQ ID NO: 25425 - DNA, 20 bp, Artificial Sequence
  Description of Artificial Sequence: Synthetic oligonucleotide
  Target: COL7A1; (-) strand; PAM type: YTN; PAM sequence: CTT
ctggcctgaaggtgagtcta

SEQ ID NO: 25426 - DNA, 20 bp, Artificial Sequence
  Description of Artificial Sequence: Synthetic oligonucleotide
  Target: COL7A1; (-) strand; PAM type: YTN; PAM sequence: CTG
caggaccccaaggaccttct

SEQ ID NO: 25427 - DNA, 20 bp, Artificial Sequence
  Description of Artificial Sequence: Synthetic oligonucleotide
  Target: COL7A1; (-) strand; PAM type: YTN; PAM sequence: CTG
gccctgcaggaccccaagga

SEQ ID NO: 25428 - DNA, 20 bp, Artificial Sequence
  Description of Artificial Sequence: Synthetic oligonucleotide
  Target: COL7A1; (-) strand; PAM type: YTN; PAM sequence: TTG
ctggccctgcaggaccccaa

SEQ ID NO: 25429 - DNA, 20 bp, Artificial Sequence
  Description of Artificial Sequence: Synthetic oligonucleotide
  Target: COL7A1; (-) strand; PAM type: YTN; PAM sequence: CTT
gctggccctgcaggacccca

SEQ ID NO: 25430 - DNA, 20 bp, Artificial Sequence
  Description of Artificial Sequence: Synthetic oligonucleotide
  Target: COL7A1; (-) strand; PAM type: YTN; PAM sequence: CTA
gggtcttgctggccctgcag

SEQ ID NO: 25431 - DNA, 20 bp, Artificial Sequence
  Description of Artificial Sequence: Synthetic oligonucleotide
  Target: COL7A1; (-) strand; PAM type: YTN; PAM sequence: CTC
tagggtcttgctggccctgc

SEQ ID NO: 25432 - DNA, 20 bp, Artificial Sequence
  Description of Artificial Sequence: Synthetic oligonucleotide
  Target: COL7A1; (-) strand; PAM type: YTN; PAM sequence: TTC
tctagggtcttgctggccct

SEQ ID NO: 25433 - DNA, 20 bp, Artificial Sequence
  Description of Artificial Sequence: Synthetic oligonucleotide
  Target: COL7A1; (-) strand; PAM type: YTN; PAM sequence: TTT
ctctagggtcttgctggccc

SEQ ID NO: 25434 - DNA, 20 bp, Artificial Sequence
  Description of Artificial Sequence: Synthetic oligonucleotide
  Target: COL7A1; (-) strand; PAM type: YTN; PAM sequence: TTT
tctctagggtcttgctggcc

SEQ ID NO: 25435 - DNA, 20 bp, Artificial Sequence
  Description of Artificial Sequence: Synthetic oligonucleotide
  Target: COL7A1; (-) strand; PAM type: YTN; PAM sequence: CTT
ttctctagggtcttgctggc

SEQ ID NO: 25436 - DNA, 20 bp, Artificial Sequence
  Description of Artificial Sequence: Synthetic oligonucleotide
  Target: COL7A1; (-) strand; PAM type: YTN; PAM sequence: TTG
acccttttctctagggtctt

SEQ ID NO: 25437 - DNA, 20 bp, Artificial Sequence
  Description of Artificial Sequence: Synthetic oligonucleotide
  Target: COL7A1; (-) strand; PAM type: YTN; PAM sequence: CTT
gacccttttctctagggtct

SEQ ID NO: 25438 - DNA, 20 bp, Artificial Sequence
  Description of Artificial Sequence: Synthetic oligonucleotide
  Target: COL7A1; (-) strand; PAM type: YTN; PAM sequence: CTG
cccttgacccttttctctag

SEQ ID NO: 25439 - DNA, 20 bp, Artificial Sequence
  Description of Artificial Sequence: Synthetic oligonucleotide
  Target: COL7A1; (-) strand; PAM type: YTN; PAM sequence: TTC
cctgcccttgacccttttct

SEQ ID NO: 25440 - DNA, 20 bp, Artificial Sequence
  Description of Artificial Sequence: Synthetic oligonucleotide
  Target: COL7A1; (-) strand; PAM type: YTN; PAM sequence: CTG
ttccctgcccttgacccttt

SEQ ID NO: 25441 - DNA, 20 bp, Artificial Sequence
  Description of Artificial Sequence: Synthetic oligonucleotide
  Target: COL7A1; (-) strand; PAM type: YTN; PAM sequence: CTG
agccctgttccctgcccttg

SEQ ID NO: 25442 - DNA, 20 bp, Artificial Sequence
  Description of Artificial Sequence: Synthetic oligonucleotide
  Target: COL7A1; (-) strand; PAM type: YTN; PAM sequence: TTA
atccctgagccctgttccct

SEQ ID NO: 25443 - DNA, 20 bp, Artificial Sequence
  Description of Artificial Sequence: Synthetic oligonucleotide
  Target: COL7A1; (-) strand; PAM type: YTN; PAM sequence: CTG
tgttaatccctgagccctgt

SEQ ID NO: 25444 - DNA, 20 bp, Artificial Sequence
  Description of Artificial Sequence: Synthetic oligonucleotide
  Target: COL7A1; (-) strand; PAM type: YTN; PAM sequence: CTC
tgtgttaatccctgagccct

SEQ ID NO: 25445 - DNA, 20 bp, Artificial Sequence
  Description of Artificial Sequence: Synthetic oligonucleotide
  Target: COL7A1; (-) strand; PAM type: YTN; PAM sequence: TTC
tctgtgttaatccctgagcc

SEQ ID NO: 25446 - DNA, 20 bp, Artificial Sequence
  Description of Artificial Sequence: Synthetic oligonucleotide
  Target: COL7A1; (-) strand; PAM type: YTN; PAM sequence: CTT
ctctgtgttaatccctgagc

SEQ ID NO: 25447 - DNA, 20 bp, Artificial Sequence
  Description of Artificial Sequence: Synthetic oligonucleotide
  Target: COL7A1; (-) strand; PAM type: YTN; PAM sequence: CTG
atgagccaggccttctctgt

SEQ ID NO: 25448 - DNA, 20 bp, Artificial Sequence
  Description of Artificial Sequence: Synthetic oligonucleotide
  Target: COL7A1; (-) strand; PAM type: YTN; PAM sequence: TTG
gccacagctgatgagccagg

SEQ ID NO: 25449 - DNA, 20 bp, Artificial Sequence
  Description of Artificial Sequence: Synthetic oligonucleotide
  Target: COL7A1; (-) strand; PAM type: YTN; PAM sequence: CTG
ggataggcattggccacagc

SEQ ID NO: 25450 - DNA, 20 bp, Artificial Sequence
  Description of Artificial Sequence: Synthetic oligonucleotide
  Target: COL7A1; (-) strand; PAM type: YTN; PAM sequence: CTG
gaagggctgggataggcatt

SEQ ID NO: 25451 - DNA, 20 bp, Artificial Sequence
  Description of Artificial Sequence: Synthetic oligonucleotide
  Target: COL7A1; (-) strand; PAM type: YTN; PAM sequence: CTG
gtgagggtctggaagggctg

SEQ ID NO: 25452 - DNA, 20 bp, Artificial Sequence
  Description of Artificial Sequence: Synthetic oligonucleotide
  Target: COL7A1; (-) strand; PAM type: YTN; PAM sequence: CTG
cctggtgagggtctggaagg

SEQ ID NO: 25453 - DNA, 20 bp, Artificial Sequence
  Description of Artificial Sequence: Synthetic oligonucleotide
  Target: COL7A1; (-) strand; PAM type: YTN; PAM sequence: CTG
gtgccccggtgagtgaccag

SEQ ID NO: 25454 - DNA, 20 bp, Artificial Sequence
  Description of Artificial Sequence: Synthetic oligonucleotide
  Target: COL7A1; (-) strand; PAM type: YTN; PAM sequence: CTG
gaccacctggtgccccggtg

SEQ ID NO: 25455 - DNA, 20 bp, Artificial Sequence
  Description of Artificial Sequence: Synthetic oligonucleotide
  Target: COL7A1; (-) strand; PAM type: YTN; PAM sequence: TTC
gccacaacagggtggtcatg

SEQ ID NO: 25456 - DNA, 20 bp, Artificial Sequence
  Description of Artificial Sequence: Synthetic oligonucleotide
  Target: COL7A1; (-) strand; PAM type: YTN; PAM sequence: TTT
cgccacaacagggtggtcat

SEQ ID NO: 25457 - DNA, 20 bp, Artificial Sequence
  Description of Artificial Sequence: Synthetic oligonucleotide
  Target: COL7A1; (-) strand; PAM type: YTN; PAM sequence: TTT
tcgccacaacagggtggtca

SEQ ID NO: 25458 - DNA, 20 bp, Artificial Sequence
  Description of Artificial Sequence: Synthetic oligonucleotide
  Target: COL7A1; (-) strand; PAM type: YTN; PAM sequence: TTT
ttcgccacaacagggtggtc

SEQ ID NO: 25459 - DNA, 20 bp, Artificial Sequence
  Description of Artificial Sequence: Synthetic oligonucleotide
  Target: COL7A1; (-) strand; PAM type: YTN; PAM sequence: CTT
tttcgccacaacagggtggt

SEQ ID NO: 25460 - DNA, 20 bp, Artificial Sequence
  Description of Artificial Sequence: Synthetic oligonucleotide
  Target: COL7A1; (-) strand; PAM type: YTN; PAM sequence: CTC
tttttcgccacaacagggtg

SEQ ID NO: 25461 - DNA, 20 bp, Artificial Sequence
  Description of Artificial Sequence: Synthetic oligonucleotide
  Target: COL7A1; (-) strand; PAM type: YTN; PAM sequence: CTC
atcagactctttttcgccac

SEQ ID NO: 25462 - DNA, 20 bp, Artificial Sequence
  Description of Artificial Sequence: Synthetic oligonucleotide
  Target: COL7A1; (-) strand; PAM type: YTN; PAM sequence: CTC
cccctcatcagactcttttt

SEQ ID NO: 25463 - DNA, 20 bp, Artificial Sequence
  Description of Artificial Sequence: Synthetic oligonucleotide
  Target: COL7A1; (-) strand; PAM type: YTN; PAM sequence: CTA
actccccctcatcagactct

SEQ ID NO: 25464 - DNA, 20 bp, Artificial Sequence
  Description of Artificial Sequence: Synthetic oligonucleotide
  Target: COL7A1; (-) strand; PAM type: YTN; PAM sequence: TTG
gtggggtgcggctaactccc

SEQ ID NO: 25465 - DNA, 20 bp, Artificial Sequence
  Description of Artificial Sequence: Synthetic oligonucleotide
  Target: COL7A1; (-) strand; PAM type: YTN; PAM sequence: CTT
ggtggggtgcggctaactcc

SEQ ID NO: 25466 - DNA, 20 bp, Artificial Sequence
  Description of Artificial Sequence: Synthetic oligonucleotide
  Target: COL7A1; (-) strand; PAM type: YTN; PAM sequence: TTC
cttggtggggtgcggctaac

SEQ ID NO: 25467 - DNA, 20 bp, Artificial Sequence
  Description of Artificial Sequence: Synthetic oligonucleotide
  Target: COL7A1; (-) strand; PAM type: YTN; PAM sequence: TTT
ccttggtggggtgcggctaa

SEQ ID NO: 25468 - DNA, 20 bp, Artificial Sequence
  Description of Artificial Sequence: Synthetic oligonucleotide
  Target: COL7A1; (-) strand; PAM type: YTN; PAM sequence: CTC
agtttccttggtggggtgcg

SEQ ID NO: 25469 - DNA, 20 bp, Artificial Sequence
  Description of Artificial Sequence: Synthetic oligonucleotide
  Target: COL7A1; (-) strand; PAM type: YTN; PAM sequence: CTG
cctcagtttccttggtgggg

SEQ ID NO: 25470 - DNA, 20 bp, Artificial Sequence
  Description of Artificial Sequence: Synthetic oligonucleotide
  Target: COL7A1; (-) strand; PAM type: YTN; PAM sequence: CTG
ccccagtgaccagtactgcc

SEQ ID NO: 25471 - DNA, 20 bp, Artificial Sequence
  Description of Artificial Sequence: Synthetic oligonucleotide
  Target: COL7A1; (-) strand; PAM type: YTN; PAM sequence: CTG
tgccctgccccagtgaccag

SEQ ID NO: 25472 - DNA, 20 bp, Artificial Sequence
  Description of Artificial Sequence: Synthetic oligonucleotide
  Target: COL7A1; (-) strand; PAM type: YTN; PAM sequence: TTG
cccccatcctgtgccctgcc

SEQ ID NO: 25473 - DNA, 20 bp, Artificial Sequence
  Description of Artificial Sequence: Synthetic oligonucleotide
  Target: COL7A1; (-) strand; PAM type: YTN; PAM sequence: CTT
gcccccatcctgtgccctgc

SEQ ID NO: 25474 - DNA, 20 bp, Artificial Sequence
  Description of Artificial Sequence: Synthetic oligonucleotide
  Target: COL7A1; (-) strand; PAM type: YTN; PAM sequence: CTG
tcttgcccccatcctgtgcc

SEQ ID NO: 25475 - DNA, 20 bp, Artificial Sequence
  Description of Artificial Sequence: Synthetic oligonucleotide
  Target: COL7A1; (-) strand; PAM type: YTN; PAM sequence: TTC
acctgtcttgcccccatcct

SEQ ID NO: 25476 - DNA, 20 bp, Artificial Sequence
  Description of Artificial Sequence: Synthetic oligonucleotide
  Target: COL7A1; (-) strand; PAM type: YTN; PAM sequence: CTT
cacctgtcttgcccccatcc

SEQ ID NO: 25477 - DNA, 20 bp, Artificial Sequence
  Description of Artificial Sequence: Synthetic oligonucleotide
  Target: COL7A1; (-) strand; PAM type: YTN; PAM sequence: CTG
gcccagtggtgagtacccaa

SEQ ID NO: 25478 - DNA, 20 bp, Artificial Sequence
  Description of Artificial Sequence: Synthetic oligonucleotide
  Target: COL7A1; (-) strand; PAM type: YTN; PAM sequence: CTG
cagggtccaagaggcccccc

SEQ ID NO: 25479 - DNA, 20 bp, Artificial Sequence
  Description of Artificial Sequence: Synthetic oligonucleotide
  Target: COL7A1; (-) strand; PAM type: YTN; PAM sequence: CTA
tgtagggtctgcagggtcca

SEQ ID NO: 25480 - DNA, 20 bp, Artificial Sequence
  Description of Artificial Sequence: Synthetic oligonucleotide
  Target: COL7A1; (-) strand; PAM type: YTN; PAM sequence: CTC
tatgtagggtctgcagggtc

SEQ ID NO: 25481 - DNA, 20 bp, Artificial Sequence
  Description of Artificial Sequence: Synthetic oligonucleotide
  Target: COL7A1; (-) strand; PAM type: YTN; PAM sequence: CTC
tctatgtagggtctgcaggg

SEQ ID NO: 25482 - DNA, 20 bp, Artificial Sequence
  Description of Artificial Sequence: Synthetic oligonucleotide
  Target: COL7A1; (-) strand; PAM type: YTN; PAM sequence: CTC
atcagtgccctctctatgta

SEQ ID NO: 25483 - DNA, 20 bp, Artificial Sequence
  Description of Artificial Sequence: Synthetic oligonucleotide
  Target: COL7A1; (-) strand; PAM type: YTN; PAM sequence: TTG
aggctcatcagtgccctctc

SEQ ID NO: 25484 - DNA, 20 bp, Artificial Sequence
  Description of Artificial Sequence: Synthetic oligonucleotide
  Target: COL7A1; (-) strand; PAM type: YTN; PAM sequence: TTG
ggaacaggcccaagtgaggc

SEQ ID NO: 25485 - DNA, 20 bp, Artificial Sequence
  Description of Artificial Sequence: Synthetic oligonucleotide
  Target: COL7A1; (-) strand; PAM type: YTN; PAM sequence: TTG
acccccaaggaaaaagcccc

SEQ ID NO: 25486 - DNA, 20 bp, Artificial Sequence
  Description of Artificial Sequence: Synthetic oligonucleotide
  Target: COL7A1; (-) strand; PAM type: YTN; PAM sequence: CTG
gaaagggtgaggtatggaaa

SEQ ID NO: 25487 - DNA, 20 bp, Artificial Sequence
  Description of Artificial Sequence: Synthetic oligonucleotide
  Target: COL7A1; (-) strand; PAM type: YTN; PAM sequence: CTG
tgactggaaagggtgaggta

SEQ ID NO: 25488 - DNA, 20 bp, Artificial Sequence
  Description of Artificial Sequence: Synthetic oligonucleotide
  Target: COL7A1; (-) strand; PAM type: YTN; PAM sequence: TTA
tctgtgactggaaagggtga

SEQ ID NO: 25489 - DNA, 20 bp, Artificial Sequence
  Description of Artificial Sequence: Synthetic oligonucleotide
  Target: COL7A1; (-) strand; PAM type: YTN; PAM sequence: CTA
tgagaggcagtccatgggta

SEQ ID NO: 25490 - DNA, 20 bp, Artificial Sequence
  Description of Artificial Sequence: Synthetic oligonucleotide
  Target: COL7A1; (-) strand; PAM type: YTN; PAM sequence: CTA
tctatgagaggcagtccatg

SEQ ID NO: 25491 - DNA, 20 bp, Artificial Sequence
  Description of Artificial Sequence: Synthetic oligonucleotide
  Target: COL7A1; (-) strand; PAM type: YTN; PAM sequence: TTG
tatgtggatgtgtgtgtgca

SEQ ID NO: 25492 - DNA, 20 bp, Artificial Sequence
  Description of Artificial Sequence: Synthetic oligonucleotide
  Target: COL7A1; (-) strand; PAM type: YTN; PAM sequence: CTG
tgtgtggttgtatgtggatg

SEQ ID NO: 25493 - DNA, 20 bp, Artificial Sequence
  Description of Artificial Sequence: Synthetic oligonucleotide
  Target: COL7A1; (-) strand; PAM type: YTN; PAM sequence: CTG
tgtctgtgtgtggttgtatg

SEQ ID NO: 25494 - DNA, 20 bp, Artificial Sequence
  Description of Artificial Sequence: Synthetic oligonucleotide
  Target: COL7A1; (-) strand; PAM type: YTN; PAM sequence: CTG
tgtgtgcctgtgtctgtgtg

SEQ ID NO: 25495 - DNA, 20 bp, Artificial Sequence
  Description of Artificial Sequence: Synthetic oligonucleotide
  Target: COL7A1; (-) strand; PAM type: YTN; PAM sequence: CTG
tgtgtgcctgtgtgtgcctg

SEQ ID NO: 25496 - DNA, 20 bp, Artificial Sequence
  Description of Artificial Sequence: Synthetic oligonucleotide
  Target: COL7A1; (-) strand; PAM type: YTN; PAM sequence: CTG
tgtctgtgtgtgcctgtgtg

SEQ ID NO: 25497 - DNA, 20 bp, Artificial Sequence
  Description of Artificial Sequence: Synthetic oligonucleotide
  Target: COL7A1; (-) strand; PAM type: YTN; PAM sequence: TTG
tgtgtgcctgtgtctgtgtg

SEQ ID NO: 25498 - DNA, 20 bp, Artificial Sequence
  Description of Artificial Sequence: Synthetic oligonucleotide
  Target: COL7A1; (-) strand; PAM type: YTN; PAM sequence: CTT
gtgtgtgcctgtgtctgtgt

SEQ ID NO: 25499 - DNA, 20 bp, Artificial Sequence
  Description of Artificial Sequence: Synthetic oligonucleotide
  Target: COL7A1; (-) strand; PAM type: YTN; PAM sequence: CTG
cttgtgtgtgcctgtgtctg

SEQ ID NO: 25500 - DNA, 20 bp, Artificial Sequence
  Description of Artificial Sequence: Synthetic oligonucleotide
  Target: COL7A1; (-) strand; PAM type: YTN; PAM sequence: CTG
tgtgtgcctgcttgtgtgtg

SEQ ID NO: 25501 - DNA, 20 bp, Artificial Sequence
  Description of Artificial Sequence: Synthetic oligonucleotide
  Target: COL7A1; (-) strand; PAM type: YTN; PAM sequence: CTC
tgtgtgtgcctgcttgtgtg

SEQ ID NO: 25502 - DNA, 20 bp, Artificial Sequence
  Description of Artificial Sequence: Synthetic oligonucleotide
  Target: COL7A1; (-) strand; PAM type: YTN; PAM sequence: CTC
tctgtgtgtgcctgcttgtg

SEQ ID NO: 25503 - DNA, 20 bp, Artificial Sequence
  Description of Artificial Sequence: Synthetic oligonucleotide
  Target: COL7A1; (-) strand; PAM type: YTN; PAM sequence: CTG
tgtgcctctctgtgtgtgcc

SEQ ID NO: 25504 - DNA, 20 bp, Artificial Sequence
  Description of Artificial Sequence: Synthetic oligonucleotide
  Target: COL7A1; (-) strand; PAM type: YTN; PAM sequence: CTG
tgtctgtgtgcctctctgtg

SEQ ID NO: 25505 - DNA, 20 bp, Artificial Sequence
  Description of Artificial Sequence: Synthetic oligonucleotide
  Target: COL7A1; (-) strand; PAM type: YTN; PAM sequence: TTG
tgtgtacctgtgtctgtgtg

SEQ ID NO: 25506 - DNA, 20 bp, Artificial Sequence
  Description of Artificial Sequence: Synthetic oligonucleotide
  Target: COL7A1; (-) strand; PAM type: YTN; PAM sequence: TTT
gtgtgtacctgtgtctgtgt

SEQ ID NO: 25507 - DNA, 20 bp, Artificial Sequence
  Description of Artificial Sequence: Synthetic oligonucleotide
  Target: COL7A1; (-) strand; PAM type: YTN; PAM sequence: CTG
tgtgtgtgtgtttgtgtgta

SEQ ID NO: 25508 - DNA, 20 bp, Artificial Sequence
  Description of Artificial Sequence: Synthetic oligonucleotide
  Target: COL7A1; (-) strand; PAM type: YTN; PAM sequence: CTG
tgtgtgtgcatgtctgtgtg

SEQ ID NO: 25509 - DNA, 20 bp, Artificial Sequence
  Description of Artificial Sequence: Synthetic oligonucleotide
  Target: COL7A1; (-) strand; PAM type: YTN; PAM sequence: CTG
ctgtgtgtgtgcatgtctgt

SEQ ID NO: 25510 - DNA, 20 bp, Artificial Sequence
  Description of Artificial Sequence: Synthetic oligonucleotide
  Target: COL7A1; (-) strand; PAM type: YTN; PAM sequence: CTG
ctgctgtgtgtgtgcatgtc

SEQ ID NO: 25511 - DNA, 20 bp, Artificial Sequence
  Description of Artificial Sequence: Synthetic oligonucleotide
  Target: COL7A1; (-) strand; PAM type: YTN; PAM sequence: CTG
ctgctgctgtgtgtgtgcat

SEQ ID NO: 25512 - DNA, 20 bp, Artificial Sequence
  Description of Artificial Sequence: Synthetic oligonucleotide
  Target: COL7A1; (-) strand; PAM type: YTN; PAM sequence: CTA
ggtgctgctgctgctgtgtg

SEQ ID NO: 25513 - DNA, 20 bp, Artificial Sequence
  Description of Artificial Sequence: Synthetic oligonucleotide
  Target: COL7A1; (-) strand; PAM type: YTN; PAM sequence: CTC
cgctaggtgctgctgctgct

SEQ ID NO: 25514 - DNA, 20 bp, Artificial Sequence
  Description of Artificial Sequence: Synthetic oligonucleotide
  Target: COL7A1; (-) strand; PAM type: YTN; PAM sequence: CTC
cggaccctccgctaggtgct

SEQ ID NO: 25515 - DNA, 20 bp, Artificial Sequence
  Description of Artificial Sequence: Synthetic oligonucleotide
  Target: COL7A1; (-) strand; PAM type: YTN; PAM sequence: CTG
gccccaggctccggaccctc

SEQ ID NO: 25516 - DNA, 20 bp, Artificial Sequence
  Description of Artificial Sequence: Synthetic oligonucleotide
  Target: COL7A1; (-) strand; PAM type: YTN; PAM sequence: CTG
aagcacctggccccaggctc

SEQ ID NO: 25517 - DNA, 20 bp, Artificial Sequence
  Description of Artificial Sequence: Synthetic oligonucleotide
  Target: COL7A1; (-) strand; PAM type: YTN; PAM sequence: CTG
aagggaagccggtgagtggt

SEQ ID NO: 25518 - DNA, 20 bp, Artificial Sequence
  Description of Artificial Sequence: Synthetic oligonucleotide
  Target: COL7A1; (-) strand; PAM type: YTN; PAM sequence: CTG
ggcctgaagggaagccggtg

SEQ ID NO: 25519 - DNA, 20 bp, Artificial Sequence
  Description of Artificial Sequence: Synthetic oligonucleotide
  Target: COL7A1; (-) strand; PAM type: YTN; PAM sequence: CTA
ccaggagagcgtggtatggc

SEQ ID NO: 25520 - DNA, 20 bp, Artificial Sequence
  Description of Artificial Sequence: Synthetic oligonucleotide
  Target: COL7A1; (-) strand; PAM type: YTN; PAM sequence: CTG
cagggtctaccaggagagcg

SEQ ID NO: 25521 - DNA, 20 bp, Artificial Sequence
  Description of Artificial Sequence: Synthetic oligonucleotide
  Target: COL7A1; (-) strand; PAM type: YTN; PAM sequence: CTC
tgcagggtctaccaggagag

SEQ ID NO: 25522 - DNA, 20 bp, Artificial Sequence
  Description of Artificial Sequence: Synthetic oligonucleotide
  Target: COL7A1; (-) strand; PAM type: YTN; PAM sequence: TTC
tctgcagggtctaccaggag

SEQ ID NO: 25523 - DNA, 20 bp, Artificial Sequence
  Description of Artificial Sequence: Synthetic oligonucleotide
  Target: COL7A1; (-) strand; PAM type: YTN; PAM sequence: CTA
ttctctgcagggtctaccag

SEQ ID NO: 25524 - DNA, 20 bp, Artificial Sequence
  Description of Artificial Sequence: Synthetic oligonucleotide
  Target: COL7A1; (-) strand; PAM type: YTN; PAM sequence: TTA
aacctattctctgcagggtc

SEQ ID NO: 25525 - DNA, 20 bp, Artificial Sequence
  Description of Artificial Sequence: Synthetic oligonucleotide
  Target: COL7A1; (-) strand; PAM type: YTN; PAM sequence: CTT
aaacctattctctgcagggt

SEQ ID NO: 25526 - DNA, 20 bp, Artificial Sequence
  Description of Artificial Sequence: Synthetic oligonucleotide
  Target: COL7A1; (-) strand; PAM type: YTN; PAM sequence: CTA
aggccttaaacctattctct

SEQ ID NO: 25527 - DNA, 20 bp, Artificial Sequence
  Description of Artificial Sequence: Synthetic oligonucleotide
  Target: COL7A1; (-) strand; PAM type: YTN; PAM sequence: CTG
ggaaactaaggccttaaacc

SEQ ID NO: 25528 - DNA, 20 bp, Artificial Sequence
  Description of Artificial Sequence: Synthetic oligonucleotide
  Target: COL7A1; (-) strand; PAM type: YTN; PAM sequence: TTG
gaactgggaaactaaggcct

SEQ ID NO: 25529 - DNA, 20 bp, Artificial Sequence
  Description of Artificial Sequence: Synthetic oligonucleotide
  Target: COL7A1; (-) strand; PAM type: YTN; PAM sequence: CTA
gggggatggtgggtggaggg

SEQ ID NO: 25530 - DNA, 20 bp, Artificial Sequence
  Description of Artificial Sequence: Synthetic oligonucleotide
  Target: COL7A1; (-) strand; PAM type: YTN; PAM sequence: CTG
tctagggggatggtgggtgg

SEQ ID NO: 25531 - DNA, 20 bp, Artificial Sequence
  Description of Artificial Sequence: Synthetic oligonucleotide
  Target: COL7A1; (-) strand; PAM type: YTN; PAM sequence: CTC
tgtctagggggatggtgggt

SEQ ID NO: 25532 - DNA, 20 bp, Artificial Sequence
  Description of Artificial Sequence: Synthetic oligonucleotide
  Target: COL7A1; (-) strand; PAM type: YTN; PAM sequence: CTG
actctgtctagggggatggt

SEQ ID NO: 25533 - DNA, 20 bp, Artificial Sequence
  Description of Artificial Sequence: Synthetic oligonucleotide
  Target: COL7A1; (-) strand; PAM type: YTN; PAM sequence: CTG
ggtcctgactctgtctaggg

SEQ ID NO: 25534 - DNA, 20 bp, Artificial Sequence
  Description of Artificial Sequence: Synthetic oligonucleotide
  Target: COL7A1; (-) strand; PAM type: YTN; PAM sequence: CTG
tctgggtcctgactctgtct

SEQ ID NO: 25535 - DNA, 20 bp, Artificial Sequence
  Description of Artificial Sequence: Synthetic oligonucleotide
  Target: COL7A1; (-) strand; PAM type: YTN; PAM sequence: CTG
ggactgtctgggtcctgact

SEQ ID NO: 25536 - DNA, 20 bp, Artificial Sequence
  Description of Artificial Sequence: Synthetic oligonucleotide
  Target: COL7A1; (-) strand; PAM type: YTN; PAM sequence: CTG
cctgggactgtctgggtcct

SEQ ID NO: 25537 - DNA, 20 bp, Artificial Sequence
  Description of Artificial Sequence: Synthetic oligonucleotide
  Target: COL7A1; (-) strand; PAM type: YTN; PAM sequence: CTG
tactgcctgggactgtctgg

SEQ ID NO: 25538 - DNA, 20 bp, Artificial Sequence
  Description of Artificial Sequence: Synthetic oligonucleotide
  Target: COL7A1; (-) strand; PAM type: YTN; PAM sequence: CTG
gggtctgtactgcctgggac

SEQ ID NO: 25539 - DNA, 20 bp, Artificial Sequence
  Description of Artificial Sequence: Synthetic oligonucleotide
  Target: COL7A1; (-) strand; PAM type: YTN; PAM sequence: CTG
tgtgcagggctggggtctgt

SEQ ID NO: 25540 - DNA, 20 bp, Artificial Sequence
  Description of Artificial Sequence: Synthetic oligonucleotide
  Target: COL7A1; (-) strand; PAM type: YTN; PAM sequence: TTG
tcctgtgtgcagggctgggg

SEQ ID NO: 25541 - DNA, 20 bp, Artificial Sequence
  Description of Artificial Sequence: Synthetic oligonucleotide
  Target: COL7A1; (-) strand; PAM type: YTN; PAM sequence: CTC
acatgtattgtcctgtgtgc

SEQ ID NO: 25542 - DNA, 20 bp, Artificial Sequence
  Description of Artificial Sequence: Synthetic oligonucleotide
  Target: COL7A1; (-) strand; PAM type: YTN; PAM sequence: CTC
tcacatgtattgtcctgtgt

SEQ ID NO: 25543 - DNA, 20 bp, Artificial Sequence
  Description of Artificial Sequence: Synthetic oligonucleotide
  Target: COL7A1; (-) strand; PAM type: YTN; PAM sequence: TTG
cccaacagccacacatgtgc

SEQ ID NO: 25544 - DNA, 20 bp, Artificial Sequence
  Description of Artificial Sequence: Synthetic oligonucleotide
  Target: COL7A1; (-) strand; PAM type: YTN; PAM sequence: CTT
gcccaacagccacacatgtg

SEQ ID NO: 25545 - DNA, 20 bp, Artificial Sequence
  Description of Artificial Sequence: Synthetic oligonucleotide
  Target: COL7A1; (-) strand; PAM type: YTN; PAM sequence: CTG
gaccgaggggtcaggacggc

SEQ ID NO: 25546 - DNA, 20 bp, Artificial Sequence
  Description of Artificial Sequence: Synthetic oligonucleotide
  Target: COL7A1; (-) strand; PAM type: YTN; PAM sequence: TTC
agggtgtgccaggcatcaaa

SEQ ID NO: 25547 - DNA, 20 bp, Artificial Sequence
  Description of Artificial Sequence: Synthetic oligonucleotide
  Target: COL7A1; (-) strand; PAM type: YTN; PAM sequence: CTT
cagggtgtgccaggcatcaa

SEQ ID NO: 25548 - DNA, 20 bp, Artificial Sequence
  Description of Artificial Sequence: Synthetic oligonucleotide
  Target: COL7A1; (-) strand; PAM type: YTN; PAM sequence: CTG
ccttcagggtgtgccaggca

SEQ ID NO: 25549 - DNA, 20 bp, Artificial Sequence
  Description of Artificial Sequence: Synthetic oligonucleotide
  Target: COL7A1; (-) strand; PAM type: YTN; PAM sequence: CTC
tgccttcagggtgtgccagg

SEQ ID NO: 25550 - DNA, 20 bp, Artificial Sequence
  Description of Artificial Sequence: Synthetic oligonucleotide
  Target: COL7A1; (-) strand; PAM type: YTN; PAM sequence: CTC
agggcacgacactctgcctt

SEQ ID NO: 25551 - DNA, 20 bp, Artificial Sequence
  Description of Artificial Sequence: Synthetic oligonucleotide
  Target: COL7A1; (-) strand; PAM type: YTN; PAM sequence: CTG
ggggctcagggcacgacact

SEQ ID NO: 25552 - DNA, 20 bp, Artificial Sequence
  Description of Artificial Sequence: Synthetic oligonucleotide
  Target: COL7A1; (-) strand; PAM type: YTN; PAM sequence: CTG
ggcacgtggcagggactggg

SEQ ID NO: 25553 - DNA, 20 bp, Artificial Sequence
  Description of Artificial Sequence: Synthetic oligonucleotide
  Target: COL7A1; (-) strand; PAM type: YTN; PAM sequence: CTA
gaggtggtgtgcatatgcac

SEQ ID NO: 25554 - DNA, 20 bp, Artificial Sequence
  Description of Artificial Sequence: Synthetic oligonucleotide
  Target: COL7A1; (-) strand; PAM type: YTN; PAM sequence: CTG
ggggcacactagaggtggtg

SEQ ID NO: 25555 - DNA, 20 bp, Artificial Sequence
  Description of Artificial Sequence: Synthetic oligonucleotide
  Target: COL7A1; (-) strand; PAM type: YTN; PAM sequence: TTC
tgggggcacactagaggtgg

SEQ ID NO: 25556 - DNA, 20 bp, Artificial Sequence
  Description of Artificial Sequence: Synthetic oligonucleotide
  Target: COL7A1; (-) strand; PAM type: YTN; PAM sequence: TTT
ctgggggcacactagaggtg

SEQ ID NO: 25557 - DNA, 20 bp, Artificial Sequence
  Description of Artificial Sequence: Synthetic oligonucleotide
  Target: COL7A1; (-) strand; PAM type: YTN; PAM sequence: CTT
tctgggggcacactagaggt

SEQ ID NO: 25558 - DNA, 20 bp, Artificial Sequence
  Description of Artificial Sequence: Synthetic oligonucleotide
  Target: COL7A1; (-) strand; PAM type: YTN; PAM sequence: CTC
ctttctgggggcacactaga

SEQ ID NO: 25559 - DNA, 20 bp, Artificial Sequence
  Description of Artificial Sequence: Synthetic oligonucleotide
  Target: COL7A1; (-) strand; PAM type: YTN; PAM sequence: TTC
catagagtccccctcctttc

SEQ ID NO: 25560 - DNA, 20 bp, Artificial Sequence
  Description of Artificial Sequence: Synthetic oligonucleotide
  Target: COL7A1; (-) strand; PAM type: YTN; PAM sequence: CTT
ccatagagtccccctccttt

SEQ ID NO: 25561 - DNA, 20 bp, Artificial Sequence
  Description of Artificial Sequence: Synthetic oligonucleotide
  Target: COL7A1; (-) strand; PAM type: YTN; PAM sequence: CTC
cacccttccatagagtcccc

SEQ ID NO: 25562 - DNA, 20 bp, Artificial Sequence
  Description of Artificial Sequence: Synthetic oligonucleotide
  Target: COL7A1; (-) strand; PAM type: YTN; PAM sequence: CTC
tccacccttccatagagtcc

SEQ ID NO: 25563 - DNA, 20 bp, Artificial Sequence
  Description of Artificial Sequence: Synthetic oligonucleotide
  Target: COL7A1; (-) strand; PAM type: YTN; PAM sequence: CTC
tctccacccttccatagagt

SEQ ID NO: 25564 - DNA, 20 bp, Artificial Sequence
  Description of Artificial Sequence: Synthetic oligonucleotide
  Target: COL7A1; (-) strand; PAM type: YTN; PAM sequence: CTC
atccccacagggggagccgg

SEQ ID NO: 25565 - DNA, 20 bp, Artificial Sequence
  Description of Artificial Sequence: Synthetic oligonucleotide
  Target: COL7A1; (-) strand; PAM type: YTN; PAM sequence: TTG
acatctcatccccacagggg

SEQ ID NO: 25566 - DNA, 20 bp, Artificial Sequence
  Description of Artificial Sequence: Synthetic oligonucleotide
  Target: COL7A1; (-) strand; PAM type: YTN; PAM sequence: CTT
gacatctcatccccacaggg

SEQ ID NO: 25567 - DNA, 20 bp, Artificial Sequence
  Description of Artificial Sequence: Synthetic oligonucleotide
  Target: COL7A1; (-) strand; PAM type: YTN; PAM sequence: CTG
acttgacatctcatccccac

SEQ ID NO: 25568 - DNA, 20 bp, Artificial Sequence
  Description of Artificial Sequence: Synthetic oligonucleotide
  Target: COL7A1; (-) strand; PAM type: YTN; PAM sequence: CTA
gggactgacttgacatctca

SEQ ID NO: 25569 - DNA, 20 bp, Artificial Sequence
  Description of Artificial Sequence: Synthetic oligonucleotide
  Target: COL7A1; (-) strand; PAM type: YTN; PAM sequence: CTG
ccatggcactagggactgac

SEQ ID NO: 25570 - DNA, 20 bp, Artificial Sequence
  Description of Artificial Sequence: Synthetic oligonucleotide
  Target: COL7A1; (-) strand; PAM type: YTN; PAM sequence: CTC
tgccatggcactagggactg

SEQ ID NO: 25571 - DNA, 20 bp, Artificial Sequence
  Description of Artificial Sequence: Synthetic oligonucleotide
  Target: COL7A1; (-) strand; PAM type: YTN; PAM sequence: CTC
ggggccaccctctgccatgg

SEQ ID NO: 25572 - DNA, 20 bp, Artificial Sequence
  Description of Artificial Sequence: Synthetic oligonucleotide
  Target: COL7A1; (-) strand; PAM type: YTN; PAM sequence: CTA
aggtcagtgtgtggaatcag

SEQ ID NO: 25573 - DNA, 20 bp, Artificial Sequence
  Description of Artificial Sequence: Synthetic oligonucleotide
  Target: COL7A1; (-) strand; PAM type: YTN; PAM sequence: CTC
aagggtgctaaggtcagtgt

SEQ ID NO: 25574 - DNA, 20 bp, Artificial Sequence
  Description of Artificial Sequence: Synthetic oligonucleotide
  Target: COL7A1; (-) strand; PAM type: YTN; PAM sequence: CTG
gactcaagggtgctaaggtc

SEQ ID NO: 25575 - DNA, 20 bp, Artificial Sequence
  Description of Artificial Sequence: Synthetic oligonucleotide
  Target: COL7A1; (-) strand; PAM type: YTN; PAM sequence: CTG
gagaacagggaccccctgga

SEQ ID NO: 25576 - DNA, 20 bp, Artificial Sequence
  Description of Artificial Sequence: Synthetic oligonucleotide
  Target: COL7A1; (-) strand; PAM type: YTN; PAM sequence: CTC
tggagaacagggaccccctg

SEQ ID NO: 25577 - DNA, 20 bp, Artificial Sequence
  Description of Artificial Sequence: Synthetic oligonucleotide
  Target: COL7A1; (-) strand; PAM type: YTN; PAM sequence: CTC
tctggagaacagggaccccc

SEQ ID NO: 25578 - DNA, 20 bp, Artificial Sequence
  Description of Artificial Sequence: Synthetic oligonucleotide
  Target: COL7A1; (-) strand; PAM type: YTN; PAM sequence: CTG
gactctctggagaacaggga

SEQ ID NO: 25579 - DNA, 20 bp, Artificial Sequence
  Description of Artificial Sequence: Synthetic oligonucleotide
  Target: COL7A1; (-) strand; PAM type: YTN; PAM sequence: CTG
tggatgagccaggtcctgga

SEQ ID NO: 25580 - DNA, 20 bp, Artificial Sequence
  Description of Artificial Sequence: Synthetic oligonucleotide
  Target: COL7A1; (-) strand; PAM type: YTN; PAM sequence: TTG
taggtgtctgtggatgagcc

SEQ ID NO: 25581 - DNA, 20 bp, Artificial Sequence
  Description of Artificial Sequence: Synthetic oligonucleotide
  Target: COL7A1; (-) strand; PAM type: YTN; PAM sequence: TTT
gtaggtgtctgtggatgagc

SEQ ID NO: 25582 - DNA, 20 bp, Artificial Sequence
  Description of Artificial Sequence: Synthetic oligonucleotide
  Target: COL7A1; (-) strand; PAM type: YTN; PAM sequence: TTG
tgtttgtaggtgtctgtgga

SEQ ID NO: 25583 - DNA, 20 bp, Artificial Sequence
  Description of Artificial Sequence: Synthetic oligonucleotide
  Target: COL7A1; (-) strand; PAM type: YTN; PAM sequence: CTT
gtgtttgtaggtgtctgtgg

SEQ ID NO: 25584 - DNA, 20 bp, Artificial Sequence
  Description of Artificial Sequence: Synthetic oligonucleotide
  Target: COL7A1; (-) strand; PAM type: YTN; PAM sequence: CTG
tgaccttgtgtttgtaggtg

SEQ ID NO: 25585 - DNA, 20 bp, Artificial Sequence
  Description of Artificial Sequence: Synthetic oligonucleotide
  Target: COL7A1; (-) strand; PAM type: YTN; PAM sequence: CTC
ccctgtgaccttgtgtttgt

SEQ ID NO: 25586 - DNA, 20 bp, Artificial Sequence
  Description of Artificial Sequence: Synthetic oligonucleotide
  Target: COL7A1; (-) strand; PAM type: YTN; PAM sequence: CTC
tcccctgtgaccttgtgttt

SEQ ID NO: 25587 - DNA, 20 bp, Artificial Sequence
  Description of Artificial Sequence: Synthetic oligonucleotide
  Target: COL7A1; (-) strand; PAM type: YTN; PAM sequence: CTA
tgacagagacatctctcccc

SEQ ID NO: 25588 - DNA, 20 bp, Artificial Sequence
  Description of Artificial Sequence: Synthetic oligonucleotide
  Target: COL7A1; (-) strand; PAM type: YTN; PAM sequence: CTC
tatgacagagacatctctcc

SEQ ID NO: 25589 - DNA, 20 bp, Artificial Sequence
  Description of Artificial Sequence: Synthetic oligonucleotide
  Target: COL7A1; (-) strand; PAM type: YTN; PAM sequence: CTC
ccccatgcctctatgacaga

SEQ ID NO: 25590 - DNA, 20 bp, Artificial Sequence
  Description of Artificial Sequence: Synthetic oligonucleotide
  Target: COL7A1; (-) strand; PAM type: YTN; PAM sequence: CTG
tgatgactcccccatgcctc

SEQ ID NO: 25591 - DNA, 20 bp, Artificial Sequence
  Description of Artificial Sequence: Synthetic oligonucleotide
  Target: COL7A1; (-) strand; PAM type: YTN; PAM sequence: CTG
agatctgtgatgactccccc

SEQ ID NO: 25592 - DNA, 20 bp, Artificial Sequence
  Description of Artificial Sequence: Synthetic oligonucleotide
  Target: COL7A1; (-) strand; PAM type: YTN; PAM sequence: CTG
tgatcctgagatctgtgatg

SEQ ID NO: 25593 - DNA, 20 bp, Artificial Sequence
  Description of Artificial Sequence: Synthetic oligonucleotide
  Target: COL7A1; (-) strand; PAM type: YTN; PAM sequence: CTC
tgtgatcctgagatctgtga

SEQ ID NO: 25594 - DNA, 20 bp, Artificial Sequence
  Description of Artificial Sequence: Synthetic oligonucleotide
  Target: COL7A1; (-) strand; PAM type: YTN; PAM sequence: CTA
taaccctctgtgatcctgag

SEQ ID NO: 25595 - DNA, 20 bp, Artificial Sequence
  Description of Artificial Sequence: Synthetic oligonucleotide
  Target: COL7A1; (-) strand; PAM type: YTN; PAM sequence: CTG
accctataaccctctgtgat

SEQ ID NO: 25596 - DNA, 20 bp, Artificial Sequence
  Description of Artificial Sequence: Synthetic oligonucleotide
  Target: COL7A1; (-) strand; PAM type: YTN; PAM sequence: TTC
tgaccctataaccctctgtg

SEQ ID NO: 25597 - DNA, 20 bp, Artificial Sequence
  Description of Artificial Sequence: Synthetic oligonucleotide
  Target: COL7A1; (-) strand; PAM type: YTN; PAM sequence: TTT
ctgaccctataaccctctgt

SEQ ID NO: 25598 - DNA, 20 bp, Artificial Sequence
  Description of Artificial Sequence: Synthetic oligonucleotide
  Target: COL7A1; (-) strand; PAM type: YTN; PAM sequence: CTG
gaatttctgaccctataacc

SEQ ID NO: 25599 - DNA, 20 bp, Artificial Sequence
  Description of Artificial Sequence: Synthetic oligonucleotide
  Target: COL7A1; (-) strand; PAM type: YTN; PAM sequence: TTG
gtccccagaaatatggtagt

SEQ ID NO: 25600 - DNA, 20 bp, Artificial Sequence
  Description of Artificial Sequence: Synthetic oligonucleotide
  Target: COL7A1; (-) strand; PAM type: YTN; PAM sequence: CTT
ggtccccagaaatatggtag

SEQ ID NO: 25601 - DNA, 20 bp, Artificial Sequence
  Description of Artificial Sequence: Synthetic oligonucleotide
  Target: COL7A1; (-) strand; PAM type: YTN; PAM sequence: TTA
gcttggtccccagaaatatg

SEQ ID NO: 25602 - DNA, 20 bp, Artificial Sequence
  Description of Artificial Sequence: Synthetic oligonucleotide
  Target: COL7A1; (-) strand; PAM type: YTN; PAM sequence: CTT
agcttggtccccagaaatat

SEQ ID NO: 25603 - DNA, 20 bp, Artificial Sequence
  Description of Artificial Sequence: Synthetic oligonucleotide
  Target: COL7A1; (-) strand; PAM type: YTN; PAM sequence: CTA
gtgaccaggaagccaccctt

SEQ ID NO: 25604 - DNA, 20 bp, Artificial Sequence
  Description of Artificial Sequence: Synthetic oligonucleotide
  Target: COL7A1; (-) strand; PAM type: YTN; PAM sequence: CTG
tgactagtgaccaggaagcc

SEQ ID NO: 25605 - DNA, 20 bp, Artificial Sequence
  Description of Artificial Sequence: Synthetic oligonucleotide
  Target: COL7A1; (-) strand; PAM type: YTN; PAM sequence: TTA
gtcctgtgactagtgaccag

SEQ ID NO: 25606 - DNA, 20 bp, Artificial Sequence
  Description of Artificial Sequence: Synthetic oligonucleotide
  Target: COL7A1; (-) strand; PAM type: YTN; PAM sequence: CTT
agtcctgtgactagtgacca

SEQ ID NO: 25607 - DNA, 20 bp, Artificial Sequence
  Description of Artificial Sequence: Synthetic oligonucleotide
  Target: COL7A1; (-) strand; PAM type: YTN; PAM sequence: CTG
ccttagtcctgtgactagtg

SEQ ID NO: 25608 - DNA, 20 bp, Artificial Sequence
  Description of Artificial Sequence: Synthetic oligonucleotide
  Target: COL7A1; (-) strand; PAM type: YTN; PAM sequence: CTG
gccccaaggtgatcacccca

SEQ ID NO: 25609 - DNA, 20 bp, Artificial Sequence
  Description of Artificial Sequence: Synthetic oligonucleotide
  Target: COL7A1; (-) strand; PAM type: YTN; PAM sequence: CTG
ggccccccggaccccctggc

SEQ ID NO: 25610 - DNA, 20 bp, Artificial Sequence
  Description of Artificial Sequence: Synthetic oligonucleotide
  Target: COL7A1; (-) strand; PAM type: YTN; PAM sequence: CTG
gaacccctgggccccccgga

SEQ ID NO: 25611 - DNA, 20 bp, Artificial Sequence
  Description of Artificial Sequence: Synthetic oligonucleotide
  Target: COL7A1; (-) strand; PAM type: YTN; PAM sequence: CTC
cctggaacccctgggccccc

SEQ ID NO: 25612 - DNA, 20 bp, Artificial Sequence
  Description of Artificial Sequence: Synthetic oligonucleotide
  Target: COL7A1; (-) strand; PAM type: YTN; PAM sequence: CTG
gactccctggaacccctggg

SEQ ID NO: 25613 - DNA, 20 bp, Artificial Sequence
  Description of Artificial Sequence: Synthetic oligonucleotide
  Target: COL7A1; (-) strand; PAM type: YTN; PAM sequence: CTC
ctggactccctggaacccct

SEQ ID NO: 25614 - DNA, 20 bp, Artificial Sequence
  Description of Artificial Sequence: Synthetic oligonucleotide
  Target: COL7A1; (-) strand; PAM type: YTN; PAM sequence: CTG
cagggcagagatggccctcc

SEQ ID NO: 25615 - DNA, 20 bp, Artificial Sequence
  Description of Artificial Sequence: Synthetic oligonucleotide
  Target: COL7A1; (-) strand; PAM type: YTN; PAM sequence: TTC
ctgcagggcagagatggccc

SEQ ID NO: 25616 - DNA, 20 bp, Artificial Sequence
  Description of Artificial Sequence: Synthetic oligonucleotide
  Target: COL7A1; (-) strand; PAM type: YTN; PAM sequence: TTT
cctgcagggcagagatggcc

SEQ ID NO: 25617 - DNA, 20 bp, Artificial Sequence
  Description of Artificial Sequence: Synthetic oligonucleotide
  Target: COL7A1; (-) strand; PAM type: YTN; PAM sequence: TTG
tttcctgcagggcagagatg

SEQ ID NO: 25618 - DNA, 20 bp, Artificial Sequence
  Description of Artificial Sequence: Synthetic oligonucleotide
  Target: COL7A1; (-) strand; PAM type: YTN; PAM sequence: CTT
gtttcctgcagggcagagat

SEQ ID NO: 25619 - DNA, 20 bp, Artificial Sequence
  Description of Artificial Sequence: Synthetic oligonucleotide
  Target: COL7A1; (-) strand; PAM type: YTN; PAM sequence: TTC
ttgtttcctgcagggcagag

SEQ ID NO: 25620 - DNA, 20 bp, Artificial Sequence
  Description of Artificial Sequence: Synthetic oligonucleotide
  Target: COL7A1; (-) strand; PAM type: YTN; PAM sequence: TTT
cttgtttcctgcagggcaga

SEQ ID NO: 25621 - DNA, 20 bp, Artificial Sequence
  Description of Artificial Sequence: Synthetic oligonucleotide
  Target: COL7A1; (-) strand; PAM type: YTN; PAM sequence: TTT
tcttgtttcctgcagggcag

SEQ ID NO: 25622 - DNA, 20 bp, Artificial Sequence
  Description of Artificial Sequence: Synthetic oligonucleotide
  Target: COL7A1; (-) strand; PAM type: YTN; PAM sequence: CTG
ccaccccattttcttgtttc

SEQ ID NO: 25623 - DNA, 20 bp, Artificial Sequence
  Description of Artificial Sequence: Synthetic oligonucleotide
  Target: COL7A1; (-) strand; PAM type: YTN; PAM sequence: CTG
gggctgccaccccattttct

SEQ ID NO: 25624 - DNA, 20 bp, Artificial Sequence
  Description of Artificial Sequence: Synthetic oligonucleotide
  Target: COL7A1; (-) strand; PAM type: YTN; PAM sequence: CTG
tgctggggctgccaccccat

SEQ ID NO: 25625 - DNA, 20 bp, Artificial Sequence
  Description of Artificial Sequence: Synthetic oligonucleotide
  Target: COL7A1; (-) strand; PAM type: YTN; PAM sequence: CTG
gaggctgtgctggggctgcc

SEQ ID NO: 25626 - DNA, 20 bp, Artificial Sequence
  Description of Artificial Sequence: Synthetic oligonucleotide
  Target: COL7A1; (-) strand; PAM type: YTN; PAM sequence: CTG
tctggaggctgtgctggggc

SEQ ID NO: 25627 - DNA, 20 bp, Artificial Sequence
  Description of Artificial Sequence: Synthetic oligonucleotide
  Target: COL7A1; (-) strand; PAM type: YTN; PAM sequence: TTC
gtggggcaggctgtctggag

SEQ ID NO: 25628 - DNA, 20 bp, Artificial Sequence
  Description of Artificial Sequence: Synthetic oligonucleotide
  Target: COL7A1; (-) strand; PAM type: YTN; PAM sequence: CTT
cgtggggcaggctgtctgga

SEQ ID NO: 25629 - DNA, 20 bp, Artificial Sequence
  Description of Artificial Sequence: Synthetic oligonucleotide
  Target: COL7A1; (-) strand; PAM type: YTN; PAM sequence: CTG
cgatgggcttcgtggggcag

SEQ ID NO: 25630 - DNA, 20 bp, Artificial Sequence
  Description of Artificial Sequence: Synthetic oligonucleotide
  Target: COL7A1; (-) strand; PAM type: YTN; PAM sequence: TTC
agggagaacggggagagaaa

SEQ ID NO: 25631 - DNA, 20 bp, Artificial Sequence
  Description of Artificial Sequence: Synthetic oligonucleotide
  Target: COL7A1; (-) strand; PAM type: YTN; PAM sequence: TTT
cagggagaacggggagagaa

SEQ ID NO: 25632 - DNA, 20 bp, Artificial Sequence
  Description of Artificial Sequence: Synthetic oligonucleotide
  Target: COL7A1; (-) strand; PAM type: YTN; PAM sequence: TTG
catttcagggagaacgggga

SEQ ID NO: 25633 - DNA, 20 bp, Artificial Sequence
  Description of Artificial Sequence: Synthetic oligonucleotide
  Target: COL7A1; (-) strand; PAM type: YTN; PAM sequence: TTT
gcatttcagggagaacgggg

SEQ ID NO: 25634 - DNA, 20 bp, Artificial Sequence
  Description of Artificial Sequence: Synthetic oligonucleotide
  Target: COL7A1; (-) strand; PAM type: YTN; PAM sequence: CTA
tttgcatttcagggagaacg

SEQ ID NO: 25635 - DNA, 20 bp, Artificial Sequence
  Description of Artificial Sequence: Synthetic oligonucleotide
  Target: COL7A1; (-) strand; PAM type: YTN; PAM sequence: CTC
acccgctatttgcatttcag

SEQ ID NO: 25636 - DNA, 20 bp, Artificial Sequence
  Description of Artificial Sequence: Synthetic oligonucleotide
  Target: COL7A1; (-) strand; PAM type: YTN; PAM sequence: TTG
gccctcacccgctatttgca

SEQ ID NO: 25637 - DNA, 20 bp, Artificial Sequence
  Description of Artificial Sequence: Synthetic oligonucleotide
  Target: COL7A1; (-) strand; PAM type: YTN; PAM sequence: CTT
ggccctcacccgctatttgc

SEQ ID NO: 25638 - DNA, 20 bp, Artificial Sequence
  Description of Artificial Sequence: Synthetic oligonucleotide
  Target: COL7A1; (-) strand; PAM type: YTN; PAM sequence: TTG
ggaggggtgggaccccccat

SEQ ID NO: 25639 - DNA, 20 bp, Artificial Sequence
  Description of Artificial Sequence: Synthetic oligonucleotide
  Target: COL7A1; (-) strand; PAM type: YTN; PAM sequence: CTG
gccaggagagtgagggaaga

SEQ ID NO: 25640 - DNA, 20 bp, Artificial Sequence
  Description of Artificial Sequence: Synthetic oligonucleotide
  Target: COL7A1; (-) strand; PAM type: YTN; PAM sequence: CTG
ggggctggccaggagagtga

SEQ ID NO: 25641 - DNA, 20 bp, Artificial Sequence
  Description of Artificial Sequence: Synthetic oligonucleotide
  Target: COL7A1; (-) strand; PAM type: YTN; PAM sequence: CTG
ggggtgtgggagaggcagga

SEQ ID NO: 25642 - DNA, 20 bp, Artificial Sequence
  Description of Artificial Sequence: Synthetic oligonucleotide
  Target: COL7A1; (-) strand; PAM type: YTN; PAM sequence: CTC
ccaggcagggctgggggtgt

SEQ ID NO: 25643 - DNA, 20 bp, Artificial Sequence
  Description of Artificial Sequence: Synthetic oligonucleotide
  Target: COL7A1; (-) strand; PAM type: YTN; PAM sequence: TTC
ccgggctcccaggcagggct

SEQ ID NO: 25644 - DNA, 20 bp, Artificial Sequence
  Description of Artificial Sequence: Synthetic oligonucleotide
  Target: COL7A1; (-) strand; PAM type: YTN; PAM sequence: CTG
gtattcccgggctcccaggc

SEQ ID NO: 25645 - DNA, 20 bp, Artificial Sequence
  Description of Artificial Sequence: Synthetic oligonucleotide
  Target: COL7A1; (-) strand; PAM type: YTN; PAM sequence: CTG
gaaagcctggtattcccggg

SEQ ID NO: 25646 - DNA, 20 bp, Artificial Sequence
  Description of Artificial Sequence: Synthetic oligonucleotide
  Target: COL7A1; (-) strand; PAM type: YTN; PAM sequence: TTG
ccggggagcctggaaagcct

SEQ ID NO: 25647 - DNA, 20 bp, Artificial Sequence
  Description of Artificial Sequence: Synthetic oligonucleotide
  Target: COL7A1; (-) strand; PAM type: YTN; PAM sequence: CTT
gccggggagcctggaaagcc

SEQ ID NO: 25648 - DNA, 20 bp, Artificial Sequence
  Description of Artificial Sequence: Synthetic oligonucleotide
  Target: COL7A1; (-) strand; PAM type: YTN; PAM sequence: TTC
cggccttgccggggagcctg

SEQ ID NO: 25649 - DNA, 20 bp, Artificial Sequence
  Description of Artificial Sequence: Synthetic oligonucleotide
  Target: COL7A1; (-) strand; PAM type: YTN; PAM sequence: CTT
ccggccttgccggggagcct

SEQ ID NO: 25650 - DNA, 20 bp, Artificial Sequence
  Description of Artificial Sequence: Synthetic oligonucleotide
  Target: COL7A1; (-) strand; PAM type: YTN; PAM sequence: TTG
gggagaggggcccccccggg

SEQ ID NO: 25651 - DNA, 20 bp, Artificial Sequence
  Description of Artificial Sequence: Synthetic oligonucleotide
  Target: COL7A1; (-) strand; PAM type: YTN; PAM sequence: CTT
ggggagaggggcccccccgg

SEQ ID NO: 25652 - DNA, 20 bp, Artificial Sequence
  Description of Artificial Sequence: Synthetic oligonucleotide
  Target: COL7A1; (-) strand; PAM type: YTN; PAM sequence: CTG
gcccttggggagaggggccc

SEQ ID NO: 25653 - DNA, 20 bp, Artificial Sequence
  Description of Artificial Sequence: Synthetic oligonucleotide
  Target: COL7A1; (-) strand; PAM type: YTN; PAM sequence: CTG
gtctggcccttggggagagg

SEQ ID NO: 25654 - DNA, 20 bp, Artificial Sequence
  Description of Artificial Sequence: Synthetic oligonucleotide
  Target: COL7A1; (-) strand; PAM type: YTN; PAM sequence: CTC
aggggccacctggtctggcc

SEQ ID NO: 25655 - DNA, 20 bp, Artificial Sequence
  Description of Artificial Sequence: Synthetic oligonucleotide
  Target: COL7A1; (-) strand; PAM type: YTN; PAM sequence: CTG
gccctcaggggccacctggt

SEQ ID NO: 25656 - DNA, 20 bp, Artificial Sequence
  Description of Artificial Sequence: Synthetic oligonucleotide
  Target: COL7A1; (-) strand; PAM type: YTN; PAM sequence: CTG
aagggcgaccgtggagaccc

SEQ ID NO: 25657 - DNA, 20 bp, Artificial Sequence
  Description of Artificial Sequence: Synthetic oligonucleotide
  Target: COL7A1; (-) strand; PAM type: YTN; PAM sequence: CTG
gagaacgcgggctgaagggc

SEQ ID NO: 25658 - DNA, 20 bp, Artificial Sequence
  Description of Artificial Sequence: Synthetic oligonucleotide
  Target: COL7A1; (-) strand; PAM type: YTN; PAM sequence: TTC
ctggagaacgcgggctgaag

SEQ ID NO: 25659 - DNA, 20 bp, Artificial Sequence
  Description of Artificial Sequence: Synthetic oligonucleotide
  Target: COL7A1; (-) strand; PAM type: YTN; PAM sequence: TTT
cctggagaacgcgggctgaa

SEQ ID NO: 25660 - DNA, 20 bp, Artificial Sequence
  Description of Artificial Sequence: Synthetic oligonucleotide
  Target: COL7A1; (-) strand; PAM type: YTN; PAM sequence: CTT
tcctggagaacgcgggctga

SEQ ID NO: 25661 - DNA, 20 bp, Artificial Sequence
  Description of Artificial Sequence: Synthetic oligonucleotide
  Target: COL7A1; (-) strand; PAM type: YTN; PAM sequence: CTG
cagggccccatcggctttcc

SEQ ID NO: 25662 - DNA, 20 bp, Artificial Sequence
  Description of Artificial Sequence: Synthetic oligonucleotide
  Target: COL7A1; (-) strand; PAM type: YTN; PAM sequence: CTC
ctgcagggccccatcggctt

SEQ ID NO: 25663 - DNA, 20 bp, Artificial Sequence
  Description of Artificial Sequence: Synthetic oligonucleotide
  Target: COL7A1; (-) strand; PAM type: YTN; PAM sequence: TTC
cactcctgcagggccccatc

SEQ ID NO: 25664 - DNA, 20 bp, Artificial Sequence
  Description of Artificial Sequence: Synthetic oligonucleotide
  Target: COL7A1; (-) strand; PAM type: YTN; PAM sequence: CTT
ccactcctgcagggccccat

SEQ ID NO: 25665 - DNA, 20 bp, Artificial Sequence
  Description of Artificial Sequence: Synthetic oligonucleotide
  Target: COL7A1; (-) strand; PAM type: YTN; PAM sequence: CTC
ttccactcctgcagggcccc

SEQ ID NO: 25666 - DNA, 20 bp, Artificial Sequence
  Description of Artificial Sequence: Synthetic oligonucleotide
  Target: COL7A1; (-) strand; PAM type: YTN; PAM sequence: CTC
tcttccactcctgcagggcc

SEQ ID NO: 25667 - DNA, 20 bp, Artificial Sequence
  Description of Artificial Sequence: Synthetic oligonucleotide
  Target: COL7A1; (-) strand; PAM type: YTN; PAM sequence: TTC
tctcttccactcctgcaggg

SEQ ID NO: 25668 - DNA, 20 bp, Artificial Sequence
  Description of Artificial Sequence: Synthetic oligonucleotide
  Target: COL7A1; (-) strand; PAM type: YTN; PAM sequence: CTG
tacagccaccagcattctct

SEQ ID NO: 25669 - DNA, 20 bp, Artificial Sequence
  Description of Artificial Sequence: Synthetic oligonucleotide
  Target: COL7A1; (-) strand; PAM type: YTN; PAM sequence: TTG
tgccccgtggagtggggtgt

SEQ ID NO: 25670 - DNA, 20 bp, Artificial Sequence
  Description of Artificial Sequence: Synthetic oligonucleotide
  Target: COL7A1; (-) strand; PAM type: YTN; PAM sequence: CTC
agtgggttgtgccccgtgga

SEQ ID NO: 25671 - DNA, 20 bp, Artificial Sequence
  Description of Artificial Sequence: Synthetic oligonucleotide
  Target: COL7A1; (-) strand; PAM type: YTN; PAM sequence: CTC
aggcgaacagggccccccag

SEQ ID NO: 25672 - DNA, 20 bp, Artificial Sequence
  Description of Artificial Sequence: Synthetic oligonucleotide
  Target: COL7A1; (-) strand; PAM type: YTN; PAM sequence: CTG
tgcccgaacggcgtcgaggc

SEQ ID NO: 25673 - DNA, 20 bp, Artificial Sequence
  Description of Artificial Sequence: Synthetic oligonucleotide
  Target: COL7A1; (-) strand; PAM type: YTN; PAM sequence: CTG
cctgtgcccgaacggcgtcg

SEQ ID NO: 25674 - DNA, 20 bp, Artificial Sequence
  Description of Artificial Sequence: Synthetic oligonucleotide
  Target: COL7A1; (-) strand; PAM type: YTN; PAM sequence: TTC
ctgcctgtgcccgaacggcg

SEQ ID NO: 25675 - DNA, 20 bp, Artificial Sequence
  Description of Artificial Sequence: Synthetic oligonucleotide
  Target: COL7A1; (-) strand; PAM type: YTN; PAM sequence: CTT
cctgcctgtgcccgaacggc

SEQ ID NO: 25676 - DNA, 20 bp, Artificial Sequence
  Description of Artificial Sequence: Synthetic oligonucleotide
  Target: COL7A1; (-) strand; PAM type: YTN; PAM sequence: CTG
gtagcttcctgcctgtgccc

SEQ ID NO: 25677 - DNA, 20 bp, Artificial Sequence
  Description of Artificial Sequence: Synthetic oligonucleotide
  Target: COL7A1; (-) strand; PAM type: YTN; PAM sequence: CTC
tggtagcttcctgcctgtgc

SEQ ID NO: 25678 - DNA, 20 bp, Artificial Sequence
  Description of Artificial Sequence: Synthetic oligonucleotide
  Target: COL7A1; (-) strand; PAM type: YTN; PAM sequence: CTG
ggatgagagctctggtagct

SEQ ID NO: 25679 - DNA, 20 bp, Artificial Sequence
  Description of Artificial Sequence: Synthetic oligonucleotide
  Target: COL7A1; (-) strand; PAM type: YTN; PAM sequence: CTG
cgggagatcgtggagacctg

SEQ ID NO: 25680 - DNA, 20 bp, Artificial Sequence
  Description of Artificial Sequence: Synthetic oligonucleotide
  Target: COL7A1; (-) strand; PAM type: YTN; PAM sequence: CTG
ccctgcgggagatcgtggag

SEQ ID NO: 25681 - DNA, 20 bp, Artificial Sequence
  Description of Artificial Sequence: Synthetic oligonucleotide
  Target: COL7A1; (-) strand; PAM type: YTN; PAM sequence: CTC
aggcatctgccctgcgggag

SEQ ID NO: 25682 - DNA, 20 bp, Artificial Sequence
  Description of Artificial Sequence: Synthetic oligonucleotide
  Target: COL7A1; (-) strand; PAM type: YTN; PAM sequence: CTG
tccctcaggcatctgccctg

SEQ ID NO: 25683 - DNA, 20 bp, Artificial Sequence
  Description of Artificial Sequence: Synthetic oligonucleotide
  Target: COL7A1; (-) strand; PAM type: YTN; PAM sequence: TTG
ctgtccctcaggcatctgcc

SEQ ID NO: 25684 - DNA, 20 bp, Artificial Sequence
  Description of Artificial Sequence: Synthetic oligonucleotide
  Target: COL7A1; (-) strand; PAM type: YTN; PAM sequence: CTT
gctgtccctcaggcatctgc

SEQ ID NO: 25685 - DNA, 20 bp, Artificial Sequence
  Description of Artificial Sequence: Synthetic oligonucleotide
  Target: COL7A1; (-) strand; PAM type: YTN; PAM sequence: CTC
ttgctgtccctcaggcatct

SEQ ID NO: 25686 - DNA, 20 bp, Artificial Sequence
  Description of Artificial Sequence: Synthetic oligonucleotide
  Target: COL7A1; (-) strand; PAM type: YTN; PAM sequence: CTG
acctcttgctgtccctcagg

SEQ ID NO: 25687 - DNA, 20 bp, Artificial Sequence
  Description of Artificial Sequence: Synthetic oligonucleotide
  Target: COL7A1; (-) strand; PAM type: YTN; PAM sequence: CTC
tgacctcttgctgtccctca

SEQ ID NO: 25688 - DNA, 20 bp, Artificial Sequence
  Description of Artificial Sequence: Synthetic oligonucleotide
  Target: COL7A1; (-) strand; PAM type: YTN; PAM sequence: CTC
ctctgacctcttgctgtccc

SEQ ID NO: 25689 - DNA, 20 bp, Artificial Sequence
  Description of Artificial Sequence: Synthetic oligonucleotide
  Target: COL7A1; (-) strand; PAM type: YTN; PAM sequence: CTG
cggcgacgcaccccgctcct

SEQ ID NO: 25690 - DNA, 20 bp, Artificial Sequence
  Description of Artificial Sequence: Synthetic oligonucleotide
  Target: COL7A1; (-) strand; PAM type: YTN; PAM sequence: CTA
gtggtgcccacaggcatagg

SEQ ID NO: 25691 - DNA, 20 bp, Artificial Sequence
  Description of Artificial Sequence: Synthetic oligonucleotide
  Target: COL7A1; (-) strand; PAM type: YTN; PAM sequence: TTG
gggctagtggtgcccacagg

SEQ ID NO: 25692 - DNA, 20 bp, Artificial Sequence
  Description of Artificial Sequence: Synthetic oligonucleotide
  Target: COL7A1; (-) strand; PAM type: YTN; PAM sequence: CTT
ggggctagtggtgcccacag

SEQ ID NO: 25693 - DNA, 20 bp, Artificial Sequence
  Description of Artificial Sequence: Synthetic oligonucleotide
  Target: COL7A1; (-) strand; PAM type: YTN; PAM sequence: CTG
ggggtagggacaagtggggg

SEQ ID NO: 25694 - DNA, 20 bp, Artificial Sequence
  Description of Artificial Sequence: Synthetic oligonucleotide
  Target: COL7A1; (-) strand; PAM type: YTN; PAM sequence: TTA
ggggctgggggtagggacaa

SEQ ID NO: 25695 - DNA, 20 bp, Artificial Sequence
  Description of Artificial Sequence: Synthetic oligonucleotide
  Target: COL7A1; (-) strand; PAM type: YTN; PAM sequence: TTT
aggggctgggggtagggaca

SEQ ID NO: 25696 - DNA, 20 bp, Artificial Sequence
  Description of Artificial Sequence: Synthetic oligonucleotide
  Target: COL7A1; (-) strand; PAM type: YTN; PAM sequence: TTG
tttaggggctgggggtaggg

SEQ ID NO: 25697 - DNA, 20 bp, Artificial Sequence
  Description of Artificial Sequence: Synthetic oligonucleotide
  Target: COL7A1; (-) strand; PAM type: YTN; PAM sequence: CTG
gcatcaaggtgggttgttta

SEQ ID NO: 25698 - DNA, 20 bp, Artificial Sequence
  Description of Artificial Sequence: Synthetic oligonucleotide
  Target: COL7A1; (-) strand; PAM type: YTN; PAM sequence: CTG
ctggcatcaaggtgggttgt

SEQ ID NO: 25699 - DNA, 20 bp, Artificial Sequence
  Description of Artificial Sequence: Synthetic oligonucleotide
  Target: COL7A1; (-) strand; PAM type: YTN; PAM sequence: CTG
gaaactgctggcatcaaggt

SEQ ID NO: 25700 - DNA, 20 bp, Artificial Sequence
  Description of Artificial Sequence: Synthetic oligonucleotide
  Target: COL7A1; (-) strand; PAM type: YTN; PAM sequence: TTG
ctggaaactgctggcatcaa

SEQ ID NO: 25701 - DNA, 20 bp, Artificial Sequence
  Description of Artificial Sequence: Synthetic oligonucleotide
  Target: COL7A1; (-) strand; PAM type: YTN; PAM sequence: TTG
tccccagaatgtggatcggt

SEQ ID NO: 25702 - DNA, 20 bp, Artificial Sequence
  Description of Artificial Sequence: Synthetic oligonucleotide
  Target: COL7A1; (-) strand; PAM type: YTN; PAM sequence: TTT
gtccccagaatgtggatcgg

SEQ ID NO: 25703 - DNA, 20 bp, Artificial Sequence
  Description of Artificial Sequence: Synthetic oligonucleotide
  Target: COL7A1; (-) strand; PAM type: YTN; PAM sequence: CTT
tgtccccagaatgtggatcg

SEQ ID NO: 25704 - DNA, 20 bp, Artificial Sequence
  Description of Artificial Sequence: Synthetic oligonucleotide
  Target: COL7A1; (-) strand; PAM type: YTN; PAM sequence: TTC
acccagactttgtccccaga

SEQ ID NO: 25705 - DNA, 20 bp, Artificial Sequence
  Description of Artificial Sequence: Synthetic oligonucleotide
  Target: COL7A1; (-) strand; PAM type: YTN; PAM sequence: CTT
cacccagactttgtccccag

SEQ ID NO: 25706 - DNA, 20 bp, Artificial Sequence
  Description of Artificial Sequence: Synthetic oligonucleotide
  Target: COL7A1; (-) strand; PAM type: YTN; PAM sequence: CTG
tcatgggcagcccttcaccc

SEQ ID NO: 25707 - DNA, 20 bp, Artificial Sequence
  Description of Artificial Sequence: Synthetic oligonucleotide
  Target: COL7A1; (-) strand; PAM type: YTN; PAM sequence: CTC
tgtcatgggcagcccttcac

SEQ ID NO: 25708 - DNA, 20 bp, Artificial Sequence
  Description of Artificial Sequence: Synthetic oligonucleotide
  Target: COL7A1; (-) strand; PAM type: YTN; PAM sequence: TTC
tctgtcatgggcagcccttc

SEQ ID NO: 25709 - DNA, 20 bp, Artificial Sequence
  Description of Artificial Sequence: Synthetic oligonucleotide
  Target: COL7A1; (-) strand; PAM type: YTN; PAM sequence: CTT
ctctgtcatgggcagccctt

SEQ ID NO: 25710 - DNA, 20 bp, Artificial Sequence
  Description of Artificial Sequence: Synthetic oligonucleotide
  Target: COL7A1; (-) strand; PAM type: YTN; PAM sequence: CTG
aggccgtgcggggcagaagg

SEQ ID NO: 25711 - DNA, 20 bp, Artificial Sequence
  Description of Artificial Sequence: Synthetic oligonucleotide
  Target: COL7A1; (-) strand; PAM type: YTN; PAM sequence: TTC
ctgaggccgtgcggggcaga

SEQ ID NO: 25712 - DNA, 20 bp, Artificial Sequence
  Description of Artificial Sequence: Synthetic oligonucleotide
  Target: COL7A1; (-) strand; PAM type: YTN; PAM sequence: TTT
cctgaggccgtgcggggcag

SEQ ID NO: 25713 - DNA, 20 bp, Artificial Sequence
  Description of Artificial Sequence: Synthetic oligonucleotide
  Target: COL7A1; (-) strand; PAM type: YTN; PAM sequence: CTT
tcctgaggccgtgcggggca

SEQ ID NO: 25714 - DNA, 20 bp, Artificial Sequence
  Description of Artificial Sequence: Synthetic oligonucleotide
  Target: COL7A1; (-) strand; PAM type: YTN; PAM sequence: CTA
gggaaaagggtgtgaaggtg

SEQ ID NO: 25715 - DNA, 20 bp, Artificial Sequence
  Description of Artificial Sequence: Synthetic oligonucleotide
  Target: COL7A1; (-) strand; PAM type: YTN; PAM sequence: CTG
ggcaagaggcctagggaaaa

SEQ ID NO: 25716 - DNA, 20 bp, Artificial Sequence
  Description of Artificial Sequence: Synthetic oligonucleotide
  Target: COL7A1; (-) strand; PAM type: YTN; PAM sequence: CTC
tgggcaagaggcctagggaa

SEQ ID NO: 25717 - DNA, 20 bp, Artificial Sequence
  Description of Artificial Sequence: Synthetic oligonucleotide
  Target: COL7A1; (-) strand; PAM type: YTN; PAM sequence: CTA
aagggtgctctgggcaagag

SEQ ID NO: 25718 - DNA, 20 bp, Artificial Sequence
  Description of Artificial Sequence: Synthetic oligonucleotide
  Target: COL7A1; (-) strand; PAM type: YTN; PAM sequence: CTC
aaccaagtgctaaagggtgc

SEQ ID NO: 25719 - DNA, 20 bp, Artificial Sequence
  Description of Artificial Sequence: Synthetic oligonucleotide
  Target: COL7A1; (-) strand; PAM type: YTN; PAM sequence: CTC
cagccatgcctcaaccaagt

SEQ ID NO: 25720 - DNA, 20 bp, Artificial Sequence
  Description of Artificial Sequence: Synthetic oligonucleotide
  Target: COL7A1; (-) strand; PAM type: YTN; PAM sequence: CTC
ccaggagtctccagccatgc

SEQ ID NO: 25721 - DNA, 20 bp, Artificial Sequence
  Description of Artificial Sequence: Synthetic oligonucleotide
  Target: COL7A1; (-) strand; PAM type: YTN; PAM sequence: TTG
ggcagtggggacacaccaga

SEQ ID NO: 25722 - DNA, 20 bp, Artificial Sequence
  Description of Artificial Sequence: Synthetic oligonucleotide
  Target: COL7A1; (-) strand; PAM type: YTN; PAM sequence: CTT
gggcagtggggacacaccag

SEQ ID NO: 25723 - DNA, 20 bp, Artificial Sequence
  Description of Artificial Sequence: Synthetic oligonucleotide
  Target: COL7A1; (-) strand; PAM type: YTN; PAM sequence: CTC
aagggaacttgggcagtggg

SEQ ID NO: 25724 - DNA, 20 bp, Artificial Sequence
  Description of Artificial Sequence: Synthetic oligonucleotide
  Target: COL7A1; (-) strand; PAM type: YTN; PAM sequence: TTG
tagcccacactcaagggaac

SEQ ID NO: 25725 - DNA, 20 bp, Artificial Sequence
  Description of Artificial Sequence: Synthetic oligonucleotide
  Target: COL7A1; (-) strand; PAM type: YTN; PAM sequence: CTT
gtagcccacactcaagggaa

SEQ ID NO: 25726 - DNA, 20 bp, Artificial Sequence
  Description of Artificial Sequence: Synthetic oligonucleotide
  Target: COL7A1; (-) strand; PAM type: YTN; PAM sequence: TTC
ttgtagcccacactcaaggg

SEQ ID NO: 25727 - DNA, 20 bp, Artificial Sequence
  Description of Artificial Sequence: Synthetic oligonucleotide
  Target: COL7A1; (-) strand; PAM type: YTN; PAM sequence: TTG
gggttcttgtagcccacact

SEQ ID NO: 25728 - DNA, 20 bp, Artificial Sequence
  Description of Artificial Sequence: Synthetic oligonucleotide
  Target: COL7A1; (-) strand; PAM type: YTN; PAM sequence: CTG
ccccattggggttcttgtag

SEQ ID NO: 25729 - DNA, 20 bp, Artificial Sequence
  Description of Artificial Sequence: Synthetic oligonucleotide
  Target: COL7A1; (-) strand; PAM type: YTN; PAM sequence: TTC
agtgccctgccccattgggg

SEQ ID NO: 25730 - DNA, 20 bp, Artificial Sequence
  Description of Artificial Sequence: Synthetic oligonucleotide
  Target: COL7A1; (-) strand; PAM type: YTN; PAM sequence: CTG
tgtgttcagtgccctgcccc

SEQ ID NO: 25731 - DNA, 20 bp, Artificial Sequence
  Description of Artificial Sequence: Synthetic oligonucleotide
  Target: COL7A1; (-) strand; PAM type: YTN; PAM sequence: CTG
tgctgtgtgttcagtgccct

SEQ ID NO: 25732 - DNA, 20 bp, Artificial Sequence
  Description of Artificial Sequence: Synthetic oligonucleotide
  Target: COL7A1; (-) strand; PAM type: YTN; PAM sequence: TTC
tgtgctgtgtgttcagtgcc

SEQ ID NO: 25733 - DNA, 20 bp, Artificial Sequence
  Description of Artificial Sequence: Synthetic oligonucleotide
  Target: COL7A1; (-) strand; PAM type: YTN; PAM sequence: CTC
cataggttctgtgctgtgtg

SEQ ID NO: 25734 - DNA, 20 bp, Artificial Sequence
  Description of Artificial Sequence: Synthetic oligonucleotide
  Target: COL7A1; (-) strand; PAM type: YTN; PAM sequence: TTG
ccatgaggctccataggttc

SEQ ID NO: 25735 - DNA, 20 bp, Artificial Sequence
  Description of Artificial Sequence: Synthetic oligonucleotide
  Target: COL7A1; (-) strand; PAM type: YTN; PAM sequence: CTT
gccatgaggctccataggtt

SEQ ID NO: 25736 - DNA, 20 bp, Artificial Sequence
  Description of Artificial Sequence: Synthetic oligonucleotide
  Target: COL7A1; (-) strand; PAM type: YTN; PAM sequence: TTC
cccttgccatgaggctccat

SEQ ID NO: 25737 - DNA, 20 bp, Artificial Sequence
  Description of Artificial Sequence: Synthetic oligonucleotide
  Target: COL7A1; (-) strand; PAM type: YTN; PAM sequence: CTT
ccccttgccatgaggctcca

SEQ ID NO: 25738 - DNA, 20 bp, Artificial Sequence
  Description of Artificial Sequence: Synthetic oligonucleotide
  Target: COL7A1; (-) strand; PAM type: YTN; PAM sequence: TTG
ccatccccttccccttgcca

SEQ ID NO: 25739 - DNA, 20 bp, Artificial Sequence
  Description of Artificial Sequence: Synthetic oligonucleotide
  Target: COL7A1; (-) strand; PAM type: YTN; PAM sequence: CTT
gccatccccttccccttgcc

SEQ ID NO: 25740 - DNA, 20 bp, Artificial Sequence
  Description of Artificial Sequence: Synthetic oligonucleotide
  Target: COL7A1; (-) strand; PAM type: YTN; PAM sequence: TTG
gggccaccttgccatcccct

SEQ ID NO: 25741 - DNA, 20 bp, Artificial Sequence
  Description of Artificial Sequence: Synthetic oligonucleotide
  Target: COL7A1; (-) strand; PAM type: YTN; PAM sequence: TTG
catgcccattggggccacct

SEQ ID NO: 25742 - DNA, 20 bp, Artificial Sequence
  Description of Artificial Sequence: Synthetic oligonucleotide
  Target: COL7A1; (-) strand; PAM type: YTN; PAM sequence: TTT
gcatgcccattggggccacc

SEQ ID NO: 25743 - DNA, 20 bp, Artificial Sequence
  Description of Artificial Sequence: Synthetic oligonucleotide
  Target: COL7A1; (-) strand; PAM type: YTN; PAM sequence: TTT
tgcatgcccattggggccac

SEQ ID NO: 25744 - DNA, 20 bp, Artificial Sequence
  Description of Artificial Sequence: Synthetic oligonucleotide
  Target: COL7A1; (-) strand; PAM type: YTN; PAM sequence: CTG
ttttgcatgcccattggggc

SEQ ID NO: 25745 - DNA, 20 bp, Artificial Sequence
  Description of Artificial Sequence: Synthetic oligonucleotide
  Target: COL7A1; (-) strand; PAM type: YTN; PAM sequence: CTC
tgttttgcatgcccattggg

SEQ ID NO: 25746 - DNA, 20 bp, Artificial Sequence
  Description of Artificial Sequence: Synthetic oligonucleotide
  Target: COL7A1; (-) strand; PAM type: YTN; PAM sequence: TTG
actctgttttgcatgcccat

SEQ ID NO: 25747 - DNA, 20 bp, Artificial Sequence
  Description of Artificial Sequence: Synthetic oligonucleotide
  Target: COL7A1; (-) strand; PAM type: YTN; PAM sequence: CTT
gactctgttttgcatgccca

SEQ ID NO: 25748 - DNA, 20 bp, Artificial Sequence
  Description of Artificial Sequence: Synthetic oligonucleotide
  Target: COL7A1; (-) strand; PAM type: YTN; PAM sequence: TTG
ggatgtccccttgactctgt

SEQ ID NO: 25749 - DNA, 20 bp, Artificial Sequence
  Description of Artificial Sequence: Synthetic oligonucleotide
  Target: COL7A1; (-) strand; PAM type: YTN; PAM sequence: CTT
gggatgtccccttgactctg

SEQ ID NO: 25750 - DNA, 20 bp, Artificial Sequence
  Description of Artificial Sequence: Synthetic oligonucleotide
  Target: COL7A1; (-) strand; PAM type: YTN; PAM sequence: CTG
gaagtgtgccggtgagccag

SEQ ID NO: 25751 - DNA, 20 bp, Artificial Sequence
  Description of Artificial Sequence: Synthetic oligonucleotide
  Target: COL7A1; (-) strand; PAM type: YTN; PAM sequence: CTG
cgaggagagcctggaagtgt

SEQ ID NO: 25752 - DNA, 20 bp, Artificial Sequence
  Description of Artificial Sequence: Synthetic oligonucleotide
  Target: COL7A1; (-) strand; PAM type: YTN; PAM sequence: CTG
gagagcgtggcctgcgagga

SEQ ID NO: 25753 - DNA, 20 bp, Artificial Sequence
  Description of Artificial Sequence: Synthetic oligonucleotide
  Target: COL7A1; (-) strand; PAM type: YTN; PAM sequence: CTC
cctggagagcgtggcctgcg

SEQ ID NO: 25754 - DNA, 20 bp, Artificial Sequence
  Description of Artificial Sequence: Synthetic oligonucleotide
  Target: COL7A1; (-) strand; PAM type: YTN; PAM sequence: CTC
cagggcctccctggagagcg

SEQ ID NO: 25755 - DNA, 20 bp, Artificial Sequence
  Description of Artificial Sequence: Synthetic oligonucleotide
  Target: COL7A1; (-) strand; PAM type: YTN; PAM sequence: CTC
tccagggcctccctggagag

SEQ ID NO: 25756 - DNA, 20 bp, Artificial Sequence
  Description of Artificial Sequence: Synthetic oligonucleotide
  Target: COL7A1; (-) strand; PAM type: YTN; PAM sequence: TTC
atctctccagggcctccctg

SEQ ID NO: 25757 - DNA, 20 bp, Artificial Sequence
  Description of Artificial Sequence: Synthetic oligonucleotide
  Target: COL7A1; (-) strand; PAM type: YTN; PAM sequence: CTT
catctctccagggcctccct

SEQ ID NO: 25758 - DNA, 20 bp, Artificial Sequence
  Description of Artificial Sequence: Synthetic oligonucleotide
  Target: COL7A1; (-) strand; PAM type: YTN; PAM sequence: TTG
tcttcatctctccagggcct

SEQ ID NO: 25759 - DNA, 20 bp, Artificial Sequence
  Description of Artificial Sequence: Synthetic oligonucleotide
  Target: COL7A1; (-) strand; PAM type: YTN; PAM sequence: TTT
gtcttcatctctccagggcc

SEQ ID NO: 25760 - DNA, 20 bp, Artificial Sequence
  Description of Artificial Sequence: Synthetic oligonucleotide
  Target: COL7A1; (-) strand; PAM type: YTN; PAM sequence: CTA
gcagtttgtcttcatctctc

SEQ ID NO: 25761 - DNA, 20 bp, Artificial Sequence
  Description of Artificial Sequence: Synthetic oligonucleotide
  Target: COL7A1; (-) strand; PAM type: YTN; PAM sequence: TTC
ctagcagtttgtcttcatct

SEQ ID NO: 25762 - DNA, 20 bp, Artificial Sequence
  Description of Artificial Sequence: Synthetic oligonucleotide
  Target: COL7A1; (-) strand; PAM type: YTN; PAM sequence: CTG
gttcctagcagtttgtcttc

SEQ ID NO: 25763 - DNA, 20 bp, Artificial Sequence
  Description of Artificial Sequence: Synthetic oligonucleotide
  Target: COL7A1; (-) strand; PAM type: YTN; PAM sequence: TTC
cacatgcccaggtagccaca

SEQ ID NO: 25764 - DNA, 20 bp, Artificial Sequence
  Description of Artificial Sequence: Synthetic oligonucleotide
  Target: COL7A1; (-) strand; PAM type: YTN; PAM sequence: TTT
ccacatgcccaggtagccac

SEQ ID NO: 25765 - DNA, 20 bp, Artificial Sequence
  Description of Artificial Sequence: Synthetic oligonucleotide
  Target: COL7A1; (-) strand; PAM type: YTN; PAM sequence: TTT
tccacatgcccaggtagcca

SEQ ID NO: 25766 - DNA, 20 bp, Artificial Sequence
  Description of Artificial Sequence: Synthetic oligonucleotide
  Target: COL7A1; (-) strand; PAM type: YTN; PAM sequence: CTT
ttccacatgcccaggtagcc

SEQ ID NO: 25767 - DNA, 20 bp, Artificial Sequence
  Description of Artificial Sequence: Synthetic oligonucleotide
  Target: COL7A1; (-) strand; PAM type: YTN; PAM sequence: CTG
gatccaaaggggagcaggtg

SEQ ID NO: 25768 - DNA, 20 bp, Artificial Sequence
  Description of Artificial Sequence: Synthetic oligonucleotide
  Target: COL7A1; (-) strand; PAM type: YTN; PAM sequence: TTC
agggtgaccgtggggagact

SEQ ID NO: 25769 - DNA, 20 bp, Artificial Sequence
  Description of Artificial Sequence: Synthetic oligonucleotide
  Target: COL7A1; (-) strand; PAM type: YTN; PAM sequence: TTT
cagggtgaccgtggggagac

SEQ ID NO: 25770 - DNA, 20 bp, Artificial Sequence
  Description of Artificial Sequence: Synthetic oligonucleotide
  Target: COL7A1; (-) strand; PAM type: YTN; PAM sequence: TTT
tcagggtgaccgtggggaga

SEQ ID NO: 25771 - DNA, 20 bp, Artificial Sequence
  Description of Artificial Sequence: Synthetic oligonucleotide
  Target: COL7A1; (-) strand; PAM type: YTN; PAM sequence: TTG
ttttcagggtgaccgtgggg

SEQ ID NO: 25772 - DNA, 20 bp, Artificial Sequence
  Description of Artificial Sequence: Synthetic oligonucleotide
  Target: COL7A1; (-) strand; PAM type: YTN; PAM sequence: CTT
gttttcagggtgaccgtggg

SEQ ID NO: 25773 - DNA, 20 bp, Artificial Sequence
  Description of Artificial Sequence: Synthetic oligonucleotide
  Target: COL7A1; (-) strand; PAM type: YTN; PAM sequence: TTC
ttgttttcagggtgaccgtg

SEQ ID NO: 25774 - DNA, 20 bp, Artificial Sequence
  Description of Artificial Sequence: Synthetic oligonucleotide
  Target: COL7A1; (-) strand; PAM type: YTN; PAM sequence: CTG
gtcattcttgttttcagggt

SEQ ID NO: 25775 - DNA, 20 bp, Artificial Sequence
  Description of Artificial Sequence: Synthetic oligonucleotide
  Target: COL7A1; (-) strand; PAM type: YTN; PAM sequence: TTC
cccacctggtcattcttgtt

SEQ ID NO: 25776 - DNA, 20 bp, Artificial Sequence
  Description of Artificial Sequence: Synthetic oligonucleotide
  Target: COL7A1; (-) strand; PAM type: YTN; PAM sequence: TTT
ccccacctggtcattcttgt

SEQ ID NO: 25777 - DNA, 20 bp, Artificial Sequence
  Description of Artificial Sequence: Synthetic oligonucleotide
  Target: COL7A1; (-) strand; PAM type: YTN; PAM sequence: CTG
ggggccatttccccacctgg

SEQ ID NO: 25778 - DNA, 20 bp, Artificial Sequence
  Description of Artificial Sequence: Synthetic oligonucleotide
  Target: COL7A1; (-) strand; PAM type: YTN; PAM sequence: CTG
accaggctgggggccatttc

SEQ ID NO: 25779 - DNA, 20 bp, Artificial Sequence
  Description of Artificial Sequence: Synthetic oligonucleotide
  Target: COL7A1; (-) strand; PAM type: YTN; PAM sequence: TTG
ggtagggggcgtggtgaggg

SEQ ID NO: 25780 - DNA, 20 bp, Artificial Sequence
  Description of Artificial Sequence: Synthetic oligonucleotide
  Target: COL7A1; (-) strand; PAM type: YTN; PAM sequence: CTG
gtgtcccaggaggcacgggc

SEQ ID NO: 25781 - DNA, 20 bp, Artificial Sequence
  Description of Artificial Sequence: Synthetic oligonucleotide
  Target: COL7A1; (-) strand; PAM type: YTN; PAM sequence: TTC
ctggtgtcccaggaggcacg

SEQ ID NO: 25782 - DNA, 20 bp, Artificial Sequence
  Description of Artificial Sequence: Synthetic oligonucleotide
  Target: COL7A1; (-) strand; PAM type: YTN; PAM sequence: TTT
cctggtgtcccaggaggcac

SEQ ID NO: 25783 - DNA, 20 bp, Artificial Sequence
  Description of Artificial Sequence: Synthetic oligonucleotide
  Target: COL7A1; (-) strand; PAM type: YTN; PAM sequence: TTT
tcctggtgtcccaggaggca

SEQ ID NO: 25784 - DNA, 20 bp, Artificial Sequence
  Description of Artificial Sequence: Synthetic oligonucleotide
  Target: COL7A1; (-) strand; PAM type: YTN; PAM sequence: CTC
agggttttcctggtgtccca

SEQ ID NO: 25785 - DNA, 20 bp, Artificial Sequence
  Description of Artificial Sequence: Synthetic oligonucleotide
  Target: COL7A1; (-) strand; PAM type: YTN; PAM sequence: CTG
ccgtatctcagggttttcct

SEQ ID NO: 25786 - DNA, 20 bp, Artificial Sequence
  Description of Artificial Sequence: Synthetic oligonucleotide
  Target: COL7A1; (-) strand; PAM type: YTN; PAM sequence: TTC
tgccgtatctcagggttttc

SEQ ID NO: 25787 - DNA, 20 bp, Artificial Sequence
  Description of Artificial Sequence: Synthetic oligonucleotide
  Target: COL7A1; (-) strand; PAM type: YTN; PAM sequence: TTG
tgttctgccgtatctcaggg

SEQ ID NO: 25788 - DNA, 20 bp, Artificial Sequence
  Description of Artificial Sequence: Synthetic oligonucleotide
  Target: COL7A1; (-) strand; PAM type: YTN; PAM sequence: TTT
gtgttctgccgtatctcagg

SEQ ID NO: 25789 - DNA, 20 bp, Artificial Sequence
  Description of Artificial Sequence: Synthetic oligonucleotide
  Target: COL7A1; (-) strand; PAM type: YTN; PAM sequence: CTT
tgtgttctgccgtatctcag

SEQ ID NO: 25790 - DNA, 20 bp, Artificial Sequence
  Description of Artificial Sequence: Synthetic oligonucleotide
  Target: COL7A1; (-) strand; PAM type: YTN; PAM sequence: TTG
tgacccctttgtgttctgcc

SEQ ID NO: 25791 - DNA, 20 bp, Artificial Sequence
  Description of Artificial Sequence: Synthetic oligonucleotide
  Target: COL7A1; (-) strand; PAM type: YTN; PAM sequence: TTT
gtgacccctttgtgttctgc

SEQ ID NO: 25792 - DNA, 20 bp, Artificial Sequence
  Description of Artificial Sequence: Synthetic oligonucleotide
  Target: COL7A1; (-) strand; PAM type: YTN; PAM sequence: CTT
tgtgacccctttgtgttctg

SEQ ID NO: 25793 - DNA, 20 bp, Artificial Sequence
  Description of Artificial Sequence: Synthetic oligonucleotide
  Target: COL7A1; (-) strand; PAM type: YTN; PAM sequence: CTG
ggaagccatgggcctttgtg

SEQ ID NO: 25794 - DNA, 20 bp, Artificial Sequence
  Description of Artificial Sequence: Synthetic oligonucleotide
  Target: COL7A1; (-) strand; PAM type: YTN; PAM sequence: CTC
ctgggaagccatgggccttt

SEQ ID NO: 25795 - DNA, 20 bp, Artificial Sequence
  Description of Artificial Sequence: Synthetic oligonucleotide
  Target: COL7A1; (-) strand; PAM type: YTN; PAM sequence: TTC
aatgggcaaccctcctggga

SEQ ID NO: 25796 - DNA, 20 bp, Artificial Sequence
  Description of Artificial Sequence: Synthetic oligonucleotide
  Target: COL7A1; (-) strand; PAM type: YTN; PAM sequence: TTT
caatgggcaaccctcctggg

SEQ ID NO: 25797 - DNA, 20 bp, Artificial Sequence
  Description of Artificial Sequence: Synthetic oligonucleotide
  Target: COL7A1; (-) strand; PAM type: YTN; PAM sequence: TTA
gaagccatgatgtttcaatg

SEQ ID NO: 25798 - DNA, 20 bp, Artificial Sequence
  Description of Artificial Sequence: Synthetic oligonucleotide
  Target: COL7A1; (-) strand; PAM type: YTN; PAM sequence: TTC
agagcattagaagccatgat

SEQ ID NO: 25799 - DNA, 20 bp, Artificial Sequence
  Description of Artificial Sequence: Synthetic oligonucleotide
  Target: COL7A1; (-) strand; PAM type: YTN; PAM sequence: CTT
cagagcattagaagccatga

SEQ ID NO: 25800 - DNA, 20 bp, Artificial Sequence
  Description of Artificial Sequence: Synthetic oligonucleotide
  Target: COL7A1; (-) strand; PAM type: YTN; PAM sequence: CTG
ggacttcagagcattagaag

SEQ ID NO: 25801 - DNA, 20 bp, Artificial Sequence
  Description of Artificial Sequence: Synthetic oligonucleotide
  Target: COL7A1; (-) strand; PAM type: YTN; PAM sequence: TTC
tgggacttcagagcattaga

SEQ ID NO: 25802 - DNA, 20 bp, Artificial Sequence
  Description of Artificial Sequence: Synthetic oligonucleotide
  Target: COL7A1; (-) strand; PAM type: YTN; PAM sequence: CTG
ggtcattctgggacttcaga

SEQ ID NO: 25803 - DNA, 20 bp, Artificial Sequence
  Description of Artificial Sequence: Synthetic oligonucleotide
  Target: COL7A1; (-) strand; PAM type: YTN; PAM sequence: CTG
gccaggtgagtgtcctgggt

SEQ ID NO: 25804 - DNA, 20 bp, Artificial Sequence
  Description of Artificial Sequence: Synthetic oligonucleotide
  Target: COL7A1; (-) strand; PAM type: YTN; PAM sequence: CTC
ctggccaggtgagtgtcctg

SEQ ID NO: 25805 - DNA, 20 bp, Artificial Sequence
  Description of Artificial Sequence: Synthetic oligonucleotide
  Target: COL7A1; (-) strand; PAM type: YTN; PAM sequence: CTC
ccagggccagtgggccctcc

SEQ ID NO: 25806 - DNA, 20 bp, Artificial Sequence
  Description of Artificial Sequence: Synthetic oligonucleotide
  Target: COL7A1; (-) strand; PAM type: YTN; PAM sequence: CTC
caggcctcccagggccagtg

SEQ ID NO: 25807 - DNA, 20 bp, Artificial Sequence
  Description of Artificial Sequence: Synthetic oligonucleotide
  Target: COL7A1; (-) strand; PAM type: YTN; PAM sequence: TTG
gaccccaggggcctccaggc

SEQ ID NO: 25808 - DNA, 20 bp, Artificial Sequence
  Description of Artificial Sequence: Synthetic oligonucleotide
  Target: COL7A1; (-) strand; PAM type: YTN; PAM sequence: CTT
ggaccccaggggcctccagg

SEQ ID NO: 25809 - DNA, 20 bp, Artificial Sequence
  Description of Artificial Sequence: Synthetic oligonucleotide
  Target: COL7A1; (-) strand; PAM type: YTN; PAM sequence: CTG
gtatccttggaccccagggg

SEQ ID NO: 25810 - DNA, 20 bp, Artificial Sequence
  Description of Artificial Sequence: Synthetic oligonucleotide
  Target: COL7A1; (-) strand; PAM type: YTN; PAM sequence: CTC
ctggtatccttggaccccag

SEQ ID NO: 25811 - DNA, 20 bp, Artificial Sequence
  Description of Artificial Sequence: Synthetic oligonucleotide
  Target: COL7A1; (-) strand; PAM type: YTN; PAM sequence: TTC
acagggtcgtgatggcccca

SEQ ID NO: 25812 - DNA, 20 bp, Artificial Sequence
  Description of Artificial Sequence: Synthetic oligonucleotide
  Target: COL7A1; (-) strand; PAM type: YTN; PAM sequence: CTT
cacagggtcgtgatggcccc

SEQ ID NO: 25813 - DNA, 20 bp, Artificial Sequence
  Description of Artificial Sequence: Synthetic oligonucleotide
  Target: COL7A1; (-) strand; PAM type: YTN; PAM sequence: CTG
catccttcacagggtcgtga

SEQ ID NO: 25814 - DNA, 20 bp, Artificial Sequence
  Description of Artificial Sequence: Synthetic oligonucleotide
  Target: COL7A1; (-) strand; PAM type: YTN; PAM sequence: CTG
gctgcatccttcacagggtc

SEQ ID NO: 25815 - DNA, 20 bp, Artificial Sequence
  Description of Artificial Sequence: Synthetic oligonucleotide
  Target: COL7A1; (-) strand; PAM type: YTN; PAM sequence: CTG
atgctggctgcatccttcac

SEQ ID NO: 25816 - DNA, 20 bp, Artificial Sequence
  Description of Artificial Sequence: Synthetic oligonucleotide
  Target: COL7A1; (-) strand; PAM type: YTN; PAM sequence: CTC
agggtgctgatgctggctgc

SEQ ID NO: 25817 - DNA, 20 bp, Artificial Sequence
  Description of Artificial Sequence: Synthetic oligonucleotide
  Target: COL7A1; (-) strand; PAM type: YTN; PAM sequence: CTG
aggtctcagggtgctgatgc

SEQ ID NO: 25818 - DNA, 20 bp, Artificial Sequence
  Description of Artificial Sequence: Synthetic oligonucleotide
  Target: COL7A1; (-) strand; PAM type: YTN; PAM sequence: TTC
tgaggtctcagggtgctgat

SEQ ID NO: 25819 - DNA, 20 bp, Artificial Sequence
  Description of Artificial Sequence: Synthetic oligonucleotide
  Target: COL7A1; (-) strand; PAM type: YTN; PAM sequence: TTT
ctgaggtctcagggtgctga

SEQ ID NO: 25820 - DNA, 20 bp, Artificial Sequence
  Description of Artificial Sequence: Synthetic oligonucleotide
  Target: COL7A1; (-) strand; PAM type: YTN; PAM sequence: TTT
tctgaggtctcagggtgctg

SEQ ID NO: 25821 - DNA, 20 bp, Artificial Sequence
  Description of Artificial Sequence: Synthetic oligonucleotide
  Target: COL7A1; (-) strand; PAM type: YTN; PAM sequence: CTT
ttctgaggtctcagggtgct

SEQ ID NO: 25822 - DNA, 20 bp, Artificial Sequence
  Description of Artificial Sequence: Synthetic oligonucleotide
  Target: COL7A1; (-) strand; PAM type: YTN; PAM sequence: CTC
ttttctgaggtctcagggtg

SEQ ID NO: 25823 - DNA, 20 bp, Artificial Sequence
  Description of Artificial Sequence: Synthetic oligonucleotide
  Target: COL7A1; (-) strand; PAM type: YTN; PAM sequence: CTC
cactcttttctgaggtctca

SEQ ID NO: 25824 - DNA, 20 bp, Artificial Sequence
  Description of Artificial Sequence: Synthetic oligonucleotide
  Target: COL7A1; (-) strand; PAM type: YTN; PAM sequence: CTG
ggggaatatgactccactct

SEQ ID NO: 25825 - DNA, 20 bp, Artificial Sequence
  Description of Artificial Sequence: Synthetic oligonucleotide
  Target: COL7A1; (-) strand; PAM type: YTN; PAM sequence: CTG
accctgggggaatatgactc

SEQ ID NO: 25826 - DNA, 20 bp, Artificial Sequence
  Description of Artificial Sequence: Synthetic oligonucleotide
  Target: COL7A1; (-) strand; PAM type: YTN; PAM sequence: CTG
accctgaccctgggggaata

SEQ ID NO: 25827 - DNA, 20 bp, Artificial Sequence
  Description of Artificial Sequence: Synthetic oligonucleotide
  Target: COL7A1; (-) strand; PAM type: YTN; PAM sequence: CTG
acccctgaccctgaccctgg

SEQ ID NO: 25828 - DNA, 20 bp, Artificial Sequence
  Description of Artificial Sequence: Synthetic oligonucleotide
  Target: COL7A1; (-) strand; PAM type: YTN; PAM sequence: CTC
tgacccctgaccctgaccct

SEQ ID NO: 25829 - DNA, 20 bp, Artificial Sequence
  Description of Artificial Sequence: Synthetic oligonucleotide
  Target: COL7A1; (-) strand; PAM type: YTN; PAM sequence: CTG
caacctctgacccctgaccc

SEQ ID NO: 25830 - DNA, 20 bp, Artificial Sequence
  Description of Artificial Sequence: Synthetic oligonucleotide
  Target: COL7A1; (-) strand; PAM type: YTN; PAM sequence: TTC
tgcaacctctgacccctgac

SEQ ID NO: 25831 - DNA, 20 bp, Artificial Sequence
  Description of Artificial Sequence: Synthetic oligonucleotide
  Target: COL7A1; (-) strand; PAM type: YTN; PAM sequence: TTT
ctgcaacctctgacccctga

SEQ ID NO: 25832 - DNA, 20 bp, Artificial Sequence
  Description of Artificial Sequence: Synthetic oligonucleotide
  Target: COL7A1; (-) strand; PAM type: YTN; PAM sequence: TTT
tctgcaacctctgacccctg

SEQ ID NO: 25833 - DNA, 20 bp, Artificial Sequence
  Description of Artificial Sequence: Synthetic oligonucleotide
  Target: COL7A1; (-) strand; PAM type: YTN; PAM sequence: TTG
gagttttctgcaacctctga

SEQ ID NO: 25834 - DNA, 20 bp, Artificial Sequence
  Description of Artificial Sequence: Synthetic oligonucleotide
  Target: COL7A1; (-) strand; PAM type: YTN; PAM sequence: CTG
ggagagaagtgagtattgga

SEQ ID NO: 25835 - DNA, 20 bp, Artificial Sequence
  Description of Artificial Sequence: Synthetic oligonucleotide
  Target: COL7A1; (-) strand; PAM type: YTN; PAM sequence: CTC
tgggagagaagtgagtattg

SEQ ID NO: 25836 - DNA, 20 bp, Artificial Sequence
  Description of Artificial Sequence: Synthetic oligonucleotide
  Target: COL7A1; (-) strand; PAM type: YTN; PAM sequence: TTC
aggcgcctctgggagagaag

SEQ ID NO: 25837 - DNA, 20 bp, Artificial Sequence
  Description of Artificial Sequence: Synthetic oligonucleotide
  Target: COL7A1; (-) strand; PAM type: YTN; PAM sequence: TTA
gggagagaaaggagattcag

SEQ ID NO: 25838 - DNA, 20 bp, Artificial Sequence
  Description of Artificial Sequence: Synthetic oligonucleotide
  Target: COL7A1; (-) strand; PAM type: YTN; PAM sequence: CTT
agggagagaaaggagattca

SEQ ID NO: 25839 - DNA, 20 bp, Artificial Sequence
  Description of Artificial Sequence: Synthetic oligonucleotide
  Target: COL7A1; (-) strand; PAM type: YTN; PAM sequence: TTC
cttagggagagaaaggagat

SEQ ID NO: 25840 - DNA, 20 bp, Artificial Sequence
  Description of Artificial Sequence: Synthetic oligonucleotide
  Target: COL7A1; (-) strand; PAM type: YTN; PAM sequence: CTT
ccttagggagagaaaggaga

SEQ ID NO: 25841 - DNA, 20 bp, Artificial Sequence
  Description of Artificial Sequence: Synthetic oligonucleotide
  Target: COL7A1; (-) strand; PAM type: YTN; PAM sequence: TTG
tcttccttagggagagaaag

SEQ ID NO: 25842 - DNA, 20 bp, Artificial Sequence
  Description of Artificial Sequence: Synthetic oligonucleotide
  Target: COL7A1; (-) strand; PAM type: YTN; PAM sequence: CTT
gtcttccttagggagagaaa

SEQ ID NO: 25843 - DNA, 20 bp, Artificial Sequence
  Description of Artificial Sequence: Synthetic oligonucleotide
  Target: COL7A1; (-) strand; PAM type: YTN; PAM sequence: CTG
aagcatccttgtcttcctta

SEQ ID NO: 25844 - DNA, 20 bp, Artificial Sequence
  Description of Artificial Sequence: Synthetic oligonucleotide
  Target: COL7A1; (-) strand; PAM type: YTN; PAM sequence: TTG
gagccatgcctgaagcatcc

SEQ ID NO: 25845 - DNA, 20 bp, Artificial Sequence
  Description of Artificial Sequence: Synthetic oligonucleotide
  Target: COL7A1; (-) strand; PAM type: YTN; PAM sequence: CTT
ggagccatgcctgaagcatc

SEQ ID NO: 25846 - DNA, 20 bp, Artificial Sequence
  Description of Artificial Sequence: Synthetic oligonucleotide
  Target: COL7A1; (-) strand; PAM type: YTN; PAM sequence: CTG
cttggagccatgcctgaagc

SEQ ID NO: 25847 - DNA, 20 bp, Artificial Sequence
  Description of Artificial Sequence: Synthetic oligonucleotide
  Target: COL7A1; (-) strand; PAM type: YTN; PAM sequence: CTC
tgcttggagccatgcctgaa

SEQ ID NO: 25848 - DNA, 20 bp, Artificial Sequence
  Description of Artificial Sequence: Synthetic oligonucleotide
  Target: COL7A1; (-) strand; PAM type: YTN; PAM sequence: CTG
gtctctgcttggagccatgc

SEQ ID NO: 25849 - DNA, 20 bp, Artificial Sequence
  Description of Artificial Sequence: Synthetic oligonucleotide
  Target: COL7A1; (-) strand; PAM type: YTN; PAM sequence: CTC
tggtctctgcttggagccat

SEQ ID NO: 25850 - DNA, 20 bp, Artificial Sequence
  Description of Artificial Sequence: Synthetic oligonucleotide
  Target: COL7A1; (-) strand; PAM type: YTN; PAM sequence: CTC
tctggtctctgcttggagcc

SEQ ID NO: 25851 - DNA, 20 bp, Artificial Sequence
  Description of Artificial Sequence: Synthetic oligonucleotide
  Target: COL7A1; (-) strand; PAM type: YTN; PAM sequence: CTG
gggtctctctggtctctgct

SEQ ID NO: 25852 - DNA, 20 bp, Artificial Sequence
  Description of Artificial Sequence: Synthetic oligonucleotide
  Target: COL7A1; (-) strand; PAM type: YTN; PAM sequence: CTG
gagaagacgggaggaaggta

SEQ ID NO: 25853 - DNA, 20 bp, Artificial Sequence
  Description of Artificial Sequence: Synthetic oligonucleotide
  Target: COL7A1; (-) strand; PAM type: YTN; PAM sequence: CTG
gggaccctggagaagacggg

SEQ ID NO: 25854 - DNA, 20 bp, Artificial Sequence
  Description of Artificial Sequence: Synthetic oligonucleotide
  Target: COL7A1; (-) strand; PAM type: YTN; PAM sequence: CTG
cccacagggagaacctgggg

SEQ ID NO: 25855 - DNA, 20 bp, Artificial Sequence
  Description of Artificial Sequence: Synthetic oligonucleotide
  Target: COL7A1; (-) strand; PAM type: YTN; PAM sequence: CTC
tgcccacagggagaacctgg

SEQ ID NO: 25856 - DNA, 20 bp, Artificial Sequence
  Description of Artificial Sequence: Synthetic oligonucleotide
  Target: COL7A1; (-) strand; PAM type: YTN; PAM sequence: CTG
atgtgagtcctctgcccaca

SEQ ID NO: 25857 - DNA, 20 bp, Artificial Sequence
  Description of Artificial Sequence: Synthetic oligonucleotide
  Target: COL7A1; (-) strand; PAM type: YTN; PAM sequence: TTG
ggctgatgtgagtcctctgc

SEQ ID NO: 25858 - DNA, 20 bp, Artificial Sequence
  Description of Artificial Sequence: Synthetic oligonucleotide
  Target: COL7A1; (-) strand; PAM type: YTN; PAM sequence: TTT
gggctgatgtgagtcctctg

SEQ ID NO: 25859 - DNA, 20 bp, Artificial Sequence
  Description of Artificial Sequence: Synthetic oligonucleotide
  Target: COL7A1; (-) strand; PAM type: YTN; PAM sequence: TTG
cagccagacaccagtgaatg

SEQ ID NO: 25860 - DNA, 20 bp, Artificial Sequence
  Description of Artificial Sequence: Synthetic oligonucleotide
  Target: COL7A1; (-) strand; PAM type: YTN; PAM sequence: CTT
gcagccagacaccagtgaat

SEQ ID NO: 25861 - DNA, 20 bp, Artificial Sequence
  Description of Artificial Sequence: Synthetic oligonucleotide
  Target: COL7A1; (-) strand; PAM type: YTN; PAM sequence: CTA
gcaaggtagtgtcttgcagc

SEQ ID NO: 25862 - DNA, 20 bp, Artificial Sequence
  Description of Artificial Sequence: Synthetic oligonucleotide
  Target: COL7A1; (-) strand; PAM type: YTN; PAM sequence: CTG
aaatctagcaaggtagtgtc

SEQ ID NO: 25863 - DNA, 20 bp, Artificial Sequence
  Description of Artificial Sequence: Synthetic oligonucleotide
  Target: COL7A1; (-) strand; PAM type: YTN; PAM sequence: CTA
caggcacagaaatacagtca

SEQ ID NO: 25864 - DNA, 20 bp, Artificial Sequence
  Description of Artificial Sequence: Synthetic oligonucleotide
  Target: COL7A1; (-) strand; PAM type: YTN; PAM sequence: CTC
caagacacacacaaccatgg

SEQ ID NO: 25865 - DNA, 20 bp, Artificial Sequence
  Description of Artificial Sequence: Synthetic oligonucleotide
  Target: COL7A1; (-) strand; PAM type: YTN; PAM sequence: CTC
agacggccacaggccatgct

SEQ ID NO: 25866 - DNA, 20 bp, Artificial Sequence
  Description of Artificial Sequence: Synthetic oligonucleotide
  Target: COL7A1; (-) strand; PAM type: YTN; PAM sequence: CTC
actcagacggccacaggcca

SEQ ID NO: 25867 - DNA, 20 bp, Artificial Sequence
  Description of Artificial Sequence: Synthetic oligonucleotide
  Target: COL7A1; (-) strand; PAM type: YTN; PAM sequence: TTA
gacatgtagcagctcactca

SEQ ID NO: 25868 - DNA, 20 bp, Artificial Sequence
  Description of Artificial Sequence: Synthetic oligonucleotide
  Target: COL7A1; (-) strand; PAM type: YTN; PAM sequence: CTT
agacatgtagcagctcactc

SEQ ID NO: 25869 - DNA, 20 bp, Artificial Sequence
  Description of Artificial Sequence: Synthetic oligonucleotide
  Target: COL7A1; (-) strand; PAM type: YTN; PAM sequence: CTA
tgcaggcacacccttagaca

SEQ ID NO: 25870 - DNA, 20 bp, Artificial Sequence
  Description of Artificial Sequence: Synthetic oligonucleotide
  Target: COL7A1; (-) strand; PAM type: YTN; PAM sequence: TTG
gggtgagcaggcctatgcag

SEQ ID NO: 25871 - DNA, 20 bp, Artificial Sequence
  Description of Artificial Sequence: Synthetic oligonucleotide
  Target: COL7A1; (-) strand; PAM type: YTN; PAM sequence: CTG
ttggggtgagcaggcctatg

SEQ ID NO: 25872 - DNA, 20 bp, Artificial Sequence
  Description of Artificial Sequence: Synthetic oligonucleotide
  Target: COL7A1; (-) strand; PAM type: YTN; PAM sequence: TTG
cctgttggggtgagcaggcc

SEQ ID NO: 25873 - DNA, 20 bp, Artificial Sequence
  Description of Artificial Sequence: Synthetic oligonucleotide
  Target: COL7A1; (-) strand; PAM type: YTN; PAM sequence: CTA
gagagccagagtcaaaggac

SEQ ID NO: 25874 - DNA, 20 bp, Artificial Sequence
  Description of Artificial Sequence: Synthetic oligonucleotide
  Target: COL7A1; (-) strand; PAM type: YTN; PAM sequence: CTC
tagagagccagagtcaaagg

SEQ ID NO: 25875 - DNA, 20 bp, Artificial Sequence
  Description of Artificial Sequence: Synthetic oligonucleotide
  Target: COL7A1; (-) strand; PAM type: YTN; PAM sequence: CTA
cctctagagagccagagtca

SEQ ID NO: 25876 - DNA, 20 bp, Artificial Sequence
  Description of Artificial Sequence: Synthetic oligonucleotide
  Target: COL7A1; (-) strand; PAM type: YTN; PAM sequence: CTA
agacacacatggatatgcac

SEQ ID NO: 25877 - DNA, 20 bp, Artificial Sequence
  Description of Artificial Sequence: Synthetic oligonucleotide
  Target: COL7A1; (-) strand; PAM type: YTN; PAM sequence: TTG
gagacatgtataagcccatg

SEQ ID NO: 25878 - DNA, 20 bp, Artificial Sequence
  Description of Artificial Sequence: Synthetic oligonucleotide
  Target: COL7A1; (-) strand; PAM type: YTN; PAM sequence: TTT
ggagacatgtataagcccat

SEQ ID NO: 25879 - DNA, 20 bp, Artificial Sequence
  Description of Artificial Sequence: Synthetic oligonucleotide
  Target: COL7A1; (-) strand; PAM type: YTN; PAM sequence: CTT
tggagacatgtataagccca

SEQ ID NO: 25880 - DNA, 20 bp, Artificial Sequence
  Description of Artificial Sequence: Synthetic oligonucleotide
  Target: COL7A1; (-) strand; PAM type: YTN; PAM sequence: CTC
tttggagacatgtataagcc

SEQ ID NO: 25881 - DNA, 20 bp, Artificial Sequence
  Description of Artificial Sequence: Synthetic oligonucleotide
  Target: COL7A1; (-) strand; PAM type: YTN; PAM sequence: CTC
aaggcatgtataagcccatg

SEQ ID NO: 25882 - DNA, 20 bp, Artificial Sequence
  Description of Artificial Sequence: Synthetic oligonucleotide
  Target: COL7A1; (-) strand; PAM type: YTN; PAM sequence: CTC
tcaaggcatgtataagccca

SEQ ID NO: 25883 - DNA, 20 bp, Artificial Sequence
  Description of Artificial Sequence: Synthetic oligonucleotide
  Target: COL7A1; (-) strand; PAM type: YTN; PAM sequence: TTG
cagacagatgccaagacaca

SEQ ID NO: 25884 - DNA, 20 bp, Artificial Sequence
  Description of Artificial Sequence: Synthetic oligonucleotide
  Target: COL7A1; (-) strand; PAM type: YTN; PAM sequence: CTA
cacacaagagttgcagacag

SEQ ID NO: 25885 - DNA, 20 bp, Artificial Sequence
  Description of Artificial Sequence: Synthetic oligonucleotide
  Target: COL7A1; (-) strand; PAM type: YTN; PAM sequence: TTG
agctacacacaagagttgca

SEQ ID NO: 25886 - DNA, 20 bp, Artificial Sequence
  Description of Artificial Sequence: Synthetic oligonucleotide
  Target: COL7A1; (-) strand; PAM type: YTN; PAM sequence: TTA
tggtcatacacattgagcta

SEQ ID NO: 25887 - DNA, 20 bp, Artificial Sequence
  Description of Artificial Sequence: Synthetic oligonucleotide
  Target: COL7A1; (-) strand; PAM type: YTN; PAM sequence: CTT
atggtcatacacattgagct

SEQ ID NO: 25888 - DNA, 20 bp, Artificial Sequence
  Description of Artificial Sequence: Synthetic oligonucleotide
  Target: COL7A1; (-) strand; PAM type: YTN; PAM sequence: TTA
tatggtcacccacacgctta

SEQ ID NO: 25889 - DNA, 20 bp, Artificial Sequence
  Description of Artificial Sequence: Synthetic oligonucleotide
  Target: COL7A1; (-) strand; PAM type: YTN; PAM sequence: TTT
atatggtcacccacacgctt

SEQ ID NO: 25890 - DNA, 20 bp, Artificial Sequence
  Description of Artificial Sequence: Synthetic oligonucleotide
  Target: COL7A1; (-) strand; PAM type: YTN; PAM sequence: CTT
tatatggtcacccacacgct

SEQ ID NO: 25891 - DNA, 20 bp, Artificial Sequence
  Description of Artificial Sequence: Synthetic oligonucleotide
  Target: COL7A1; (-) strand; PAM type: YTN; PAM sequence: CTG
gcccatgactttatatggtc

SEQ ID NO: 25892 - DNA, 20 bp, Artificial Sequence
  Description of Artificial Sequence: Synthetic oligonucleotide
  Target: COL7A1; (-) strand; PAM type: YTN; PAM sequence: CTA
ggacatgctggcccatgact

SEQ ID NO: 25893 - DNA, 20 bp, Artificial Sequence
  Description of Artificial Sequence: Synthetic oligonucleotide
  Target: COL7A1; (-) strand; PAM type: YTN; PAM sequence: CTG
tgacatgtgctaggacatgc

SEQ ID NO: 25894 - DNA, 20 bp, Artificial Sequence
  Description of Artificial Sequence: Synthetic oligonucleotide
  Target: COL7A1; (-) strand; PAM type: YTN; PAM sequence: CTG
acctgtgacatgtgctagga

SEQ ID NO: 25895 - DNA, 20 bp, Artificial Sequence
  Description of Artificial Sequence: Synthetic oligonucleotide
  Target: COL7A1; (-) strand; PAM type: YTN; PAM sequence: CTC
tgacctgtgacatgtgctag

SEQ ID NO: 25896 - DNA, 20 bp, Artificial Sequence
  Description of Artificial Sequence: Synthetic oligonucleotide
  Target: COL7A1; (-) strand; PAM type: YTN; PAM sequence: TTG
agacatggtgagacacacat

SEQ ID NO: 25897 - DNA, 20 bp, Artificial Sequence
  Description of Artificial Sequence: Synthetic oligonucleotide
  Target: COL7A1; (-) strand; PAM type: YTN; PAM sequence: CTG
tgttgagacatggtgagaca

SEQ ID NO: 25898 - DNA, 20 bp, Artificial Sequence
  Description of Artificial Sequence: Synthetic oligonucleotide
  Target: COL7A1; (-) strand; PAM type: YTN; PAM sequence: CTA
agacatggacccaagaccgc

SEQ ID NO: 25899 - DNA, 20 bp, Artificial Sequence
  Description of Artificial Sequence: Synthetic oligonucleotide
  Target: COL7A1; (-) strand; PAM type: YTN; PAM sequence: CTC
atgtgctaagacatggaccc

SEQ ID NO: 25900 - DNA, 20 bp, Artificial Sequence
  Description of Artificial Sequence: Synthetic oligonucleotide
  Target: COL7A1; (-) strand; PAM type: YTN; PAM sequence: TTC
cacccagactcatgtgctaa

SEQ ID NO: 25901 - DNA, 20 bp, Artificial Sequence
  Description of Artificial Sequence: Synthetic oligonucleotide
  Target: COL7A1; (-) strand; PAM type: YTN; PAM sequence: CTT
ccacccagactcatgtgcta

SEQ ID NO: 25902 - DNA, 20 bp, Artificial Sequence
  Description of Artificial Sequence: Synthetic oligonucleotide
  Target: COL7A1; (-) strand; PAM type: YTN; PAM sequence: TTG
atacccagacacttccaccc

SEQ ID NO: 25903 - DNA, 20 bp, Artificial Sequence
  Description of Artificial Sequence: Synthetic oligonucleotide
  Target: COL7A1; (-) strand; PAM type: YTN; PAM sequence: TTA
gagacatgttgatacccaga

SEQ ID NO: 25904 - DNA, 20 bp, Artificial Sequence
  Description of Artificial Sequence: Synthetic oligonucleotide
  Target: COL7A1; (-) strand; PAM type: YTN; PAM sequence: CTT
agagacatgttgatacccag

SEQ ID NO: 25905 - DNA, 20 bp, Artificial Sequence
  Description of Artificial Sequence: Synthetic oligonucleotide
  Target: COL7A1; (-) strand; PAM type: YTN; PAM sequence: TTG
gggcacttagagacatgttg

SEQ ID NO: 25906 - DNA, 20 bp, Artificial Sequence
  Description of Artificial Sequence: Synthetic oligonucleotide
  Target: COL7A1; (-) strand; PAM type: YTN; PAM sequence: TTT
ggggcacttagagacatgtt

SEQ ID NO: 25907 - DNA, 20 bp, Artificial Sequence
  Description of Artificial Sequence: Synthetic oligonucleotide
  Target: COL7A1; (-) strand; PAM type: YTN; PAM sequence: CTG
gtgtgtagccacatttgggg

SEQ ID NO: 25908 - DNA, 20 bp, Artificial Sequence
  Description of Artificial Sequence: Synthetic oligonucleotide
  Target: COL7A1; (-) strand; PAM type: YTN; PAM sequence: CTG
acacatgcccagataaccca

SEQ ID NO: 25909 - DNA, 20 bp, Artificial Sequence
  Description of Artificial Sequence: Synthetic oligonucleotide
  Target: COL7A1; (-) strand; PAM type: YTN; PAM sequence: TTA
tgccaggatgggctgacaca

SEQ ID NO: 25910 - DNA, 20 bp, Artificial Sequence
  Description of Artificial Sequence: Synthetic oligonucleotide
  Target: COL7A1; (-) strand; PAM type: YTN; PAM sequence: TTT
atgccaggatgggctgacac

SEQ ID NO: 25911 - DNA, 20 bp, Artificial Sequence
  Description of Artificial Sequence: Synthetic oligonucleotide
  Target: COL7A1; (-) strand; PAM type: YTN; PAM sequence: TTA
ggtgaatgggccaatttatg

SEQ ID NO: 25912 - DNA, 20 bp, Artificial Sequence
  Description of Artificial Sequence: Synthetic oligonucleotide
  Target: COL7A1; (-) strand; PAM type: YTN; PAM sequence: CTC
acagacacatagggagttag

SEQ ID NO: 25913 - DNA, 20 bp, Artificial Sequence
  Description of Artificial Sequence: Synthetic oligonucleotide
  Target: COL7A1; (-) strand; PAM type: YTN; PAM sequence: CTA
tatgcacacacaggcagcct

SEQ ID NO: 25914 - DNA, 20 bp, Artificial Sequence
  Description of Artificial Sequence: Synthetic oligonucleotide
  Target: COL7A1; (-) strand; PAM type: YTN; PAM sequence: TTC
tatatgcacacacaggcagc

SEQ ID NO: 25915 - DNA, 20 bp, Artificial Sequence
  Description of Artificial Sequence: Synthetic oligonucleotide
  Target: COL7A1; (-) strand; PAM type: YTN; PAM sequence: CTG
gaaacatagttctatatgca

SEQ ID NO: 25916 - DNA, 20 bp, Artificial Sequence
  Description of Artificial Sequence: Synthetic oligonucleotide
  Target: COL7A1; (-) strand; PAM type: YTN; PAM sequence: TTG
cgccaggcctggaaacatag

SEQ ID NO: 25917 - DNA, 20 bp, Artificial Sequence
  Description of Artificial Sequence: Synthetic oligonucleotide
  Target: COL7A1; (-) strand; PAM type: YTN; PAM sequence: TTA
caggcgtgagccattgcgcc

SEQ ID NO: 25918 - DNA, 20 bp, Artificial Sequence
  Description of Artificial Sequence: Synthetic oligonucleotide
  Target: COL7A1; (-) strand; PAM type: YTN; PAM sequence: CTG
ggattacaggcgtgagccat

SEQ ID NO: 25919 - DNA, 20 bp, Artificial Sequence
  Description of Artificial Sequence: Synthetic oligonucleotide
  Target: COL7A1; (-) strand; PAM type: YTN; PAM sequence: CTA
aagtgctgggattacaggcg

SEQ ID NO: 25920 - DNA, 20 bp, Artificial Sequence
  Description of Artificial Sequence: Synthetic oligonucleotide
  Target: COL7A1; (-) strand; PAM type: YTN; PAM sequence: CTC
ctaaagtgctgggattacag

SEQ ID NO: 25921 - DNA, 20 bp, Artificial Sequence
  Description of Artificial Sequence: Synthetic oligonucleotide
  Target: COL7A1; (-) strand; PAM type: YTN; PAM sequence: CTC
ggcctcctaaagtgctggga

SEQ ID NO: 25922 - DNA, 20 bp, Artificial Sequence
  Description of Artificial Sequence: Synthetic oligonucleotide
  Target: COL7A1; (-) strand; PAM type: YTN; PAM sequence: CTC
aggtgatccgcccgcctcgg

SEQ ID NO: 25923 - DNA, 20 bp, Artificial Sequence
  Description of Artificial Sequence: Synthetic oligonucleotide
  Target: COL7A1; (-) strand; PAM type: YTN; PAM sequence: CTG
acctcaggtgatccgcccgc

SEQ ID NO: 25924 - DNA, 20 bp, Artificial Sequence
  Description of Artificial Sequence: Synthetic oligonucleotide
  Target: COL7A1; (-) strand; PAM type: YTN; PAM sequence: CTG
atcacaaactgacctcaggt

SEQ ID NO: 25925 - DNA, 20 bp, Artificial Sequence
  Description of Artificial Sequence: Synthetic oligonucleotide
  Target: COL7A1; (-) strand; PAM type: YTN; PAM sequence: TTA
gtcaggctgatcacaaactg

SEQ ID NO: 25926 - DNA, 20 bp, Artificial Sequence
  Description of Artificial Sequence: Synthetic oligonucleotide
  Target: COL7A1; (-) strand; PAM type: YTN; PAM sequence: CTC
catgttagtcaggctgatca

SEQ ID NO: 25927 - DNA, 20 bp, Artificial Sequence
  Description of Artificial Sequence: Synthetic oligonucleotide
  Target: COL7A1; (-) strand; PAM type: YTN; PAM sequence: TTC
tccatgttagtcaggctgat

SEQ ID NO: 25928 - DNA, 20 bp, Artificial Sequence
  Description of Artificial Sequence: Synthetic oligonucleotide
  Target: COL7A1; (-) strand; PAM type: YTN; PAM sequence: TTT
ctccatgttagtcaggctga

SEQ ID NO: 25929 - DNA, 20 bp, Artificial Sequence
  Description of Artificial Sequence: Synthetic oligonucleotide
  Target: COL7A1; (-) strand; PAM type: YTN; PAM sequence: TTA
gtagagatggggtttctcca

SEQ ID NO: 25930 - DNA, 20 bp, Artificial Sequence
  Description of Artificial Sequence: Synthetic oligonucleotide
  Target: COL7A1; (-) strand; PAM type: YTN; PAM sequence: TTT
agtagagatggggtttctcc

SEQ ID NO: 25931 - DNA, 20 bp, Artificial Sequence
  Description of Artificial Sequence: Synthetic oligonucleotide
  Target: COL7A1; (-) strand; PAM type: YTN; PAM sequence: TTT
tagtagagatggggtttctc

SEQ ID NO: 25932 - DNA, 20 bp, Artificial Sequence
  Description of Artificial Sequence: Synthetic oligonucleotide
  Target: COL7A1; (-) strand; PAM type: YTN; PAM sequence: TTT
ttagtagagatggggtttct

SEQ ID NO: 25933 - DNA, 20 bp, Artificial Sequence
  Description of Artificial Sequence: Synthetic oligonucleotide
  Target: COL7A1; (-) strand; PAM type: YTN; PAM sequence: TTG
tatttttagtagagatgggg

SEQ ID NO: 25934 - DNA, 20 bp, Artificial Sequence
  Description of Artificial Sequence: Synthetic oligonucleotide
  Target: COL7A1; (-) strand; PAM type: YTN; PAM sequence: TTT
gtatttttagtagagatggg

SEQ ID NO: 25935 - DNA, 20 bp, Artificial Sequence
  Description of Artificial Sequence: Synthetic oligonucleotide
  Target: COL7A1; (-) strand; PAM type: YTN; PAM sequence: TTT
tgtatttttagtagagatgg

SEQ ID NO: 25936 - DNA, 20 bp, Artificial Sequence
  Description of Artificial Sequence: Synthetic oligonucleotide
  Target: COL7A1; (-) strand; PAM type: YTN; PAM sequence: CTA
attttgtatttttagtagag

SEQ ID NO: 25937 - DNA, 20 bp, Artificial Sequence
  Description of Artificial Sequence: Synthetic oligonucleotide
  Target: COL7A1; (-) strand; PAM type: YTN; PAM sequence: CTG
gctaattttgtatttttagt

SEQ ID NO: 25938 - DNA, 20 bp, Artificial Sequence
  Description of Artificial Sequence: Synthetic oligonucleotide
  Target: COL7A1; (-) strand; PAM type: YTN; PAM sequence: TTA
caggcatgcgccaccatgcc

SEQ ID NO: 25939 - DNA, 20 bp, Artificial Sequence
  Description of Artificial Sequence: Synthetic oligonucleotide
  Target: COL7A1; (-) strand; PAM type: YTN; PAM sequence: CTG
ggattacaggcatgcgccac

SEQ ID NO: 25940 - DNA, 20 bp, Artificial Sequence
  Description of Artificial Sequence: Synthetic oligonucleotide
  Target: COL7A1; (-) strand; PAM type: YTN; PAM sequence: CTC
ccgagtaactgggattacag

SEQ ID NO: 25941 - DNA, 20 bp, Artificial Sequence
  Description of Artificial Sequence: Synthetic oligonucleotide
  Target: COL7A1; (-) strand; PAM type: YTN; PAM sequence: CTC
aacctcccgagtaactggga

SEQ ID NO: 25942 - DNA, 20 bp, Artificial Sequence
  Description of Artificial Sequence: Synthetic oligonucleotide
  Target: COL7A1; (-) strand; PAM type: YTN; PAM sequence: CTG
cctcaacctcccgagtaact

SEQ ID NO: 25943 - DNA, 20 bp, Artificial Sequence
  Description of Artificial Sequence: Synthetic oligonucleotide
  Target: COL7A1; (-) strand; PAM type: YTN; PAM sequence: CTC
ctgcctcaacctcccgagta

SEQ ID NO: 25944 - DNA, 20 bp, Artificial Sequence
  Description of Artificial Sequence: Synthetic oligonucleotide
  Target: COL7A1; (-) strand; PAM type: YTN; PAM sequence: TTC
tcctgcctcaacctcccgag

SEQ ID NO: 25945 - DNA, 20 bp, Artificial Sequence
  Description of Artificial Sequence: Synthetic oligonucleotide
  Target: COL7A1; (-) strand; PAM type: YTN; PAM sequence: TTC
aagtgattctcctgcctcaa

SEQ ID NO: 25946 - DNA, 20 bp, Artificial Sequence
  Description of Artificial Sequence: Synthetic oligonucleotide
  Target: COL7A1; (-) strand; PAM type: YTN; PAM sequence: CTC
gggttcaagtgattctcctg

SEQ ID NO: 25947 - DNA, 20 bp, Artificial Sequence
  Description of Artificial Sequence: Synthetic oligonucleotide
  Target: COL7A1; (-) strand; PAM type: YTN; PAM sequence: CTC
tcgggttcaagtgattctcc

SEQ ID NO: 25948 - DNA, 20 bp, Artificial Sequence
  Description of Artificial Sequence: Synthetic oligonucleotide
  Target: COL7A1; (-) strand; PAM type: YTN; PAM sequence: TTC
gactctcgggttcaagtgat

SEQ ID NO: 25949 - DNA, 20 bp, Artificial Sequence
  Description of Artificial Sequence: Synthetic oligonucleotide
  Target: COL7A1; (-) strand; PAM type: YTN; PAM sequence: CTT
cgactctcgggttcaagtga

SEQ ID NO: 25950 - DNA, 20 bp, Artificial Sequence
  Description of Artificial Sequence: Synthetic oligonucleotide
  Target: COL7A1; (-) strand; PAM type: YTN; PAM sequence: CTG
caaccttcgactctcgggtt

SEQ ID NO: 25951 - DNA, 20 bp, Artificial Sequence
  Description of Artificial Sequence: Synthetic oligonucleotide
  Target: COL7A1; (-) strand; PAM type: YTN; PAM sequence: CTC
actgcaaccttcgactctcg

SEQ ID NO: 25952 - DNA, 20 bp, Artificial Sequence
  Description of Artificial Sequence: Synthetic oligonucleotide
  Target: COL7A1; (-) strand; PAM type: YTN; PAM sequence: CTC
agctcactgcaaccttcgac

SEQ ID NO: 25953 - DNA, 20 bp, Artificial Sequence
  Description of Artificial Sequence: Synthetic oligonucleotide
  Target: COL7A1; (-) strand; PAM type: YTN; PAM sequence: TTG
gagtgcagtggcacaatctc

SEQ ID NO: 25954 - DNA, 20 bp, Artificial Sequence
  Description of Artificial Sequence: Synthetic oligonucleotide
  Target: COL7A1; (-) strand; PAM type: YTN; PAM sequence: TTG
cccaggttggagtgcagtgg

SEQ ID NO: 25955 - DNA, 20 bp, Artificial Sequence
  Description of Artificial Sequence: Synthetic oligonucleotide
  Target: COL7A1; (-) strand; PAM type: YTN; PAM sequence: TTG
ttgcccaggttggagtgcag

SEQ ID NO: 25956 - DNA, 20 bp, Artificial Sequence
  Description of Artificial Sequence: Synthetic oligonucleotide
  Target: COL7A1; (-) strand; PAM type: YTN; PAM sequence: CTT
gttgcccaggttggagtgca

SEQ ID NO: 25957 - DNA, 20 bp, Artificial Sequence
  Description of Artificial Sequence: Synthetic oligonucleotide
  Target: COL7A1; (-) strand; PAM type: YTN; PAM sequence: CTC
ttgttgcccaggttggagtg

SEQ ID NO: 25958 - DNA, 20 bp, Artificial Sequence
  Description of Artificial Sequence: Synthetic oligonucleotide
  Target: COL7A1; (-) strand; PAM type: YTN; PAM sequence: TTC
gctcttgttgcccaggttgg

SEQ ID NO: 25959 - DNA, 20 bp, Artificial Sequence
  Description of Artificial Sequence: Synthetic oligonucleotide
  Target: COL7A1; (-) strand; PAM type: YTN; PAM sequence: TTT
cgctcttgttgcccaggttg

SEQ ID NO: 25960 - DNA, 20 bp, Artificial Sequence
  Description of Artificial Sequence: Synthetic oligonucleotide
  Target: COL7A1; (-) strand; PAM type: YTN; PAM sequence: TTG
agatggagtttcgctcttgt

SEQ ID NO: 25961 - DNA, 20 bp, Artificial Sequence
  Description of Artificial Sequence: Synthetic oligonucleotide
  Target: COL7A1; (-) strand; PAM type: YTN; PAM sequence: TTT
gagatggagtttcgctcttg

SEQ ID NO: 25962 - DNA, 20 bp, Artificial Sequence
  Description of Artificial Sequence: Synthetic oligonucleotide
  Target: COL7A1; (-) strand; PAM type: YTN; PAM sequence: TTT
tgagatggagtttcgctctt

SEQ ID NO: 25963 - DNA, 20 bp, Artificial Sequence
  Description of Artificial Sequence: Synthetic oligonucleotide
  Target: COL7A1; (-) strand; PAM type: YTN; PAM sequence: TTT
ttgagatggagtttcgctct

SEQ ID NO: 25964 - DNA, 20 bp, Artificial Sequence
  Description of Artificial Sequence: Synthetic oligonucleotide
  Target: COL7A1; (-) strand; PAM type: YTN; PAM sequence: TTT
tttgagatggagtttcgctc

SEQ ID NO: 25965 - DNA, 20 bp, Artificial Sequence
  Description of Artificial Sequence: Synthetic oligonucleotide
  Target: COL7A1; (-) strand; PAM type: YTN; PAM sequence: TTT
ttttgagatggagtttcgct

SEQ ID NO: 25966 - DNA, 20 bp, Artificial Sequence
  Description of Artificial Sequence: Synthetic oligonucleotide
  Target: COL7A1; (-) strand; PAM type: YTN; PAM sequence: TTT
tttttgagatggagtttcgc

SEQ ID NO: 25967 - DNA, 20 bp, Artificial Sequence
  Description of Artificial Sequence: Synthetic oligonucleotide
  Target: COL7A1; (-) strand; PAM type: YTN; PAM sequence: TTT
ttttttgagatggagtttcg

SEQ ID NO: 25968 - DNA, 20 bp, Artificial Sequence
  Description of Artificial Sequence: Synthetic oligonucleotide
  Target: COL7A1; (-) strand; PAM type: YTN; PAM sequence: TTT
tttttttgagatggagtttc

SEQ ID NO: 25969 - DNA, 20 bp, Artificial Sequence
  Description of Artificial Sequence: Synthetic oligonucleotide
  Target: COL7A1; (-) strand; PAM type: YTN; PAM sequence: TTT
ttttttttgagatggagttt

SEQ ID NO: 25970 - DNA, 20 bp, Artificial Sequence
  Description of Artificial Sequence: Synthetic oligonucleotide
  Target: COL7A1; (-) strand; PAM type: YTN; PAM sequence: TTT
tttttttttgagatggagtt

SEQ ID NO: 25971 - DNA, 20 bp, Artificial Sequence
  Description of Artificial Sequence: Synthetic oligonucleotide
  Target: COL7A1; (-) strand; PAM type: YTN; PAM sequence: TTT
ttttttttttgagatggagt

SEQ ID NO: 25972 - DNA, 20 bp, Artificial Sequence
  Description of Artificial Sequence: Synthetic oligonucleotide
  Target: COL7A1; (-) strand; PAM type: YTN; PAM sequence: CTG
gcccagacatacagatgcat

SEQ ID NO: 25973 - DNA, 20 bp, Artificial Sequence
  Description of Artificial Sequence: Synthetic oligonucleotide
  Target: COL7A1; (-) strand; PAM type: YTN; PAM sequence: CTG
tagcaacacatgaggcacac

SEQ ID NO: 25974 - DNA, 20 bp, Artificial Sequence
  Description of Artificial Sequence: Synthetic oligonucleotide
  Target: COL7A1; (-) strand; PAM type: YTN; PAM sequence: CTA
cacagccaagatctgtagca

SEQ ID NO: 25975 - DNA, 20 bp, Artificial Sequence
  Description of Artificial Sequence: Synthetic oligonucleotide
  Target: COL7A1; (-) strand; PAM type: YTN; PAM sequence: CTG
ccaagaaacgccagcacacc

SEQ ID NO: 25976 - DNA, 20 bp, Artificial Sequence
  Description of Artificial Sequence: Synthetic oligonucleotide
  Target: COL7A1; (-) strand; PAM type: YTN; PAM sequence: CTG
cggcgaaacctgccaagaaa

SEQ ID NO: 25977 - DNA, 20 bp, Artificial Sequence
  Description of Artificial Sequence: Synthetic oligonucleotide
  Target: COL7A1; (-) strand; PAM type: YTN; PAM sequence: CTG
aatggaaaaaacgtgagtgt

SEQ ID NO: 25978 - DNA, 20 bp, Artificial Sequence
  Description of Artificial Sequence: Synthetic oligonucleotide
  Target: COL7A1; (-) strand; PAM type: YTN; PAM sequence: CTG
gcctgaatggaaaaaacgtg

SEQ ID NO: 25979 - DNA, 20 bp, Artificial Sequence
  Description of Artificial Sequence: Synthetic oligonucleotide
  Target: COL7A1; (-) strand; PAM type: YTN; PAM sequence: TTC
ccacagggaaagccaggcga

SEQ ID NO: 25980 - DNA, 20 bp, Artificial Sequence
  Description of Artificial Sequence: Synthetic oligonucleotide
  Target: COL7A1; (-) strand; PAM type: YTN; PAM sequence: CTG
ttcccacagggaaagccagg

SEQ ID NO: 25981 - DNA, 20 bp, Artificial Sequence
  Description of Artificial Sequence: Synthetic oligonucleotide
  Target: COL7A1; (-) strand; PAM type: YTN; PAM sequence: CTC
acccgatccccgacatccaa

SEQ ID NO: 25982 - DNA, 20 bp, Artificial Sequence
  Description of Artificial Sequence: Synthetic oligonucleotide
  Target: COL7A1; (-) strand; PAM type: YTN; PAM sequence: CTA
ccctcacccgatccccgaca

SEQ ID NO: 25983 - DNA, 20 bp, Artificial Sequence
  Description of Artificial Sequence: Synthetic oligonucleotide
  Target: COL7A1; (-) strand; PAM type: YTN; PAM sequence: TTA
ctaccctcacccgatccccg

SEQ ID NO: 25984 - DNA, 20 bp, Artificial Sequence
  Description of Artificial Sequence: Synthetic oligonucleotide
  Target: COL7A1; (-) strand; PAM type: YTN; PAM sequence: CTT
actaccctcacccgatcccc

SEQ ID NO: 25985 - DNA, 20 bp, Artificial Sequence
  Description of Artificial Sequence: Synthetic oligonucleotide
  Target: COL7A1; (-) strand; PAM type: YTN; PAM sequence: TTC
ccccttactaccctcacccg

SEQ ID NO: 25986 - DNA, 20 bp, Artificial Sequence
  Description of Artificial Sequence: Synthetic oligonucleotide
  Target: COL7A1; (-) strand; PAM type: YTN; PAM sequence: TTT
cccccttactaccctcaccc

SEQ ID NO: 25987 - DNA, 20 bp, Artificial Sequence
  Description of Artificial Sequence: Synthetic oligonucleotide
  Target: COL7A1; (-) strand; PAM type: YTN; PAM sequence: TTT
tcccccttactaccctcacc

SEQ ID NO: 25988 - DNA, 20 bp, Artificial Sequence
  Description of Artificial Sequence: Synthetic oligonucleotide
  Target: COL7A1; (-) strand; PAM type: YTN; PAM sequence: CTT
ttcccccttactaccctcac

SEQ ID NO: 25989 - DNA, 20 bp, Artificial Sequence
  Description of Artificial Sequence: Synthetic oligonucleotide
  Target: COL7A1; (-) strand; PAM type: YTN; PAM sequence: TTA
cccccttttcccccttacta

SEQ ID NO: 25990 - DNA, 20 bp, Artificial Sequence
  Description of Artificial Sequence: Synthetic oligonucleotide
  Target: COL7A1; (-) strand; PAM type: YTN; PAM sequence: TTC
atgttacccccttttccccc

SEQ ID NO: 25991 - DNA, 20 bp, Artificial Sequence
  Description of Artificial Sequence: Synthetic oligonucleotide
  Target: COL7A1; (-) strand; PAM type: YTN; PAM sequence: TTT
catgttacccccttttcccc

SEQ ID NO: 25992 - DNA, 20 bp, Artificial Sequence
  Description of Artificial Sequence: Synthetic oligonucleotide
  Target: COL7A1; (-) strand; PAM type: YTN; PAM sequence: CTT
tcatgttacccccttttccc

SEQ ID NO: 25993 - DNA, 20 bp, Artificial Sequence
  Description of Artificial Sequence: Synthetic oligonucleotide
  Target: COL7A1; (-) strand; PAM type: YTN; PAM sequence: TTA
ccggtgagaccagactttca

SEQ ID NO: 25994 - DNA, 20 bp, Artificial Sequence
  Description of Artificial Sequence: Synthetic oligonucleotide
  Target: COL7A1; (-) strand; PAM type: YTN; PAM sequence: CTG
gattaccggtgagaccagac

SEQ ID NO: 25995 - DNA, 20 bp, Artificial Sequence
  Description of Artificial Sequence: Synthetic oligonucleotide
  Target: COL7A1; (-) strand; PAM type: YTN; PAM sequence: CTG
gtccccctggattaccggtg

SEQ ID NO: 25996 - DNA, 20 bp, Artificial Sequence
  Description of Artificial Sequence: Synthetic oligonucleotide
  Target: COL7A1; (-) strand; PAM type: YTN; PAM sequence: CTC
tggtccccctggattaccgg

SEQ ID NO: 25997 - DNA, 20 bp, Artificial Sequence
  Description of Artificial Sequence: Synthetic oligonucleotide
  Target: COL7A1; (-) strand; PAM type: YTN; PAM sequence: CTG
gcccctctggtccccctgga

SEQ ID NO: 25998 - DNA, 20 bp, Artificial Sequence
  Description of Artificial Sequence: Synthetic oligonucleotide
  Target: COL7A1; (-) strand; PAM type: YTN; PAM sequence: CTC
cctggcccctctggtccccc

SEQ ID NO: 25999 - DNA, 20 bp, Artificial Sequence
  Description of Artificial Sequence: Synthetic oligonucleotide
  Target: COL7A1; (-) strand; PAM type: YTN; PAM sequence: CTC
cgtggagaacagggcctccc

SEQ ID NO: 26000 - DNA, 20 bp, Artificial Sequence
  Description of Artificial Sequence: Synthetic oligonucleotide
  Target: COL7A1; (-) strand; PAM type: YTN; PAM sequence: TTC
caggcctccgtggagaacag

SEQ ID NO: 26001 - DNA, 20 bp, Artificial Sequence
  Description of Artificial Sequence: Synthetic oligonucleotide
  Target: COL7A1; (-) strand; PAM type: YTN; PAM sequence: CTT
ccaggcctccgtggagaaca

SEQ ID NO: 26002 - DNA, 20 bp, Artificial Sequence
  Description of Artificial Sequence: Synthetic oligonucleotide
  Target: COL7A1; (-) strand; PAM type: YTN; PAM sequence: TTC
caggggcttccaggcctccg

SEQ ID NO: 26003 - DNA, 20 bp, Artificial Sequence
  Description of Artificial Sequence: Synthetic oligonucleotide
  Target: COL7A1; (-) strand; PAM type: YTN; PAM sequence: TTT
ccaggggcttccaggcctcc

SEQ ID NO: 26004 - DNA, 20 bp, Artificial Sequence
  Description of Artificial Sequence: Synthetic oligonucleotide
  Target: COL7A1; (-) strand; PAM type: YTN; PAM sequence: TTT
tccaggggcttccaggcctc

SEQ ID NO: 26005 - DNA, 20 bp, Artificial Sequence
  Description of Artificial Sequence: Synthetic oligonucleotide
  Target: COL7A1; (-) strand; PAM type: YTN; PAM sequence: TTT
ttccaggggcttccaggcct

SEQ ID NO: 26006 - DNA, 20 bp, Artificial Sequence
  Description of Artificial Sequence: Synthetic oligonucleotide
  Target: COL7A1; (-) strand; PAM type: YTN; PAM sequence: CTT
tttccaggggcttccaggcc

SEQ ID NO: 26007 - DNA, 20 bp, Artificial Sequence
  Description of Artificial Sequence: Synthetic oligonucleotide
  Target: COL7A1; (-) strand; PAM type: YTN; PAM sequence: TTA
acaaagactttttccagggg

SEQ ID NO: 26008 - DNA, 20 bp, Artificial Sequence
  Description of Artificial Sequence: Synthetic oligonucleotide
  Target: COL7A1; (-) strand; PAM type: YTN; PAM sequence: CTT
aacaaagactttttccaggg

SEQ ID NO: 26009 - DNA, 20 bp, Artificial Sequence
  Description of Artificial Sequence: Synthetic oligonucleotide
  Target: COL7A1; (-) strand; PAM type: YTN; PAM sequence: CTA
taaatcttaacaaagacttt

SEQ ID NO: 26010 - DNA, 20 bp, Artificial Sequence
  Description of Artificial Sequence: Synthetic oligonucleotide
  Target: COL7A1; (-) strand; PAM type: YTN; PAM sequence: CTC
agaggccctataaatcttaa

SEQ ID NO: 26011 - DNA, 20 bp, Artificial Sequence
  Description of Artificial Sequence: Synthetic oligonucleotide
  Target: COL7A1; (-) strand; PAM type: YTN; PAM sequence: TTA
gtccatggggtgtgccccaa

SEQ ID NO: 26012 - DNA, 20 bp, Artificial Sequence
  Description of Artificial Sequence: Synthetic oligonucleotide
  Target: COL7A1; (-) strand; PAM type: YTN; PAM sequence: CTT
agtccatggggtgtgcccca

SEQ ID NO: 26013 - DNA, 20 bp, Artificial Sequence
  Description of Artificial Sequence: Synthetic oligonucleotide
  Target: COL7A1; (-) strand; PAM type: YTN; PAM sequence: CTC
ttagtccatggggtgtgccc

SEQ ID NO: 26014 - DNA, 20 bp, Artificial Sequence
  Description of Artificial Sequence: Synthetic oligonucleotide
  Target: COL7A1; (-) strand; PAM type: YTN; PAM sequence: TTG
gggtcctcttagtccatggg

SEQ ID NO: 26015 - DNA, 20 bp, Artificial Sequence
  Description of Artificial Sequence: Synthetic oligonucleotide
  Target: COL7A1; (-) strand; PAM type: YTN; PAM sequence: TTT
ggggtcctcttagtccatgg

SEQ ID NO: 26016 - DNA, 20 bp, Artificial Sequence
  Description of Artificial Sequence: Synthetic oligonucleotide
  Target: COL7A1; (-) strand; PAM type: YTN; PAM sequence: TTT
tggggtcctcttagtccatg

SEQ ID NO: 26017 - DNA, 20 bp, Artificial Sequence
  Description of Artificial Sequence: Synthetic oligonucleotide
  Target: COL7A1; (-) strand; PAM type: YTN; PAM sequence: TTT
ttggggtcctcttagtccat

SEQ ID NO: 26018 - DNA, 20 bp, Artificial Sequence
  Description of Artificial Sequence: Synthetic oligonucleotide
  Target: COL7A1; (-) strand; PAM type: YTN; PAM sequence: CTT
tttggggtcctcttagtcca

SEQ ID NO: 26019 - DNA, 20 bp, Artificial Sequence
  Description of Artificial Sequence: Synthetic oligonucleotide
  Target: COL7A1; (-) strand; PAM type: YTN; PAM sequence: CTG
gagggagatctttttggggt

SEQ ID NO: 26020 - DNA, 20 bp, Artificial Sequence
  Description of Artificial Sequence: Synthetic oligonucleotide
  Target: COL7A1; (-) strand; PAM type: YTN; PAM sequence: CTA
ccctggagggagatcttttt

SEQ ID NO: 26021 - DNA, 20 bp, Artificial Sequence
  Description of Artificial Sequence: Synthetic oligonucleotide
  Target: COL7A1; (-) strand; PAM type: YTN; PAM sequence: CTC
taccctggagggagatcttt

SEQ ID NO: 26022 - DNA, 20 bp, Artificial Sequence
  Description of Artificial Sequence: Synthetic oligonucleotide
  Target: COL7A1; (-) strand; PAM type: YTN; PAM sequence: CTG
ggggtctctaccctggaggg

SEQ ID NO: 26023 - DNA, 20 bp, Artificial Sequence
  Description of Artificial Sequence: Synthetic oligonucleotide
  Target: COL7A1; (-) strand; PAM type: YTN; PAM sequence: CTC
agtcctgggggtctctaccc

SEQ ID NO: 26024 - DNA, 20 bp, Artificial Sequence
  Description of Artificial Sequence: Synthetic oligonucleotide
  Target: COL7A1; (-) strand; PAM type: YTN; PAM sequence: CTC
tcagtcctgggggtctctac

SEQ ID NO: 26025 - DNA, 20 bp, Artificial Sequence
  Description of Artificial Sequence: Synthetic oligonucleotide
  Target: COL7A1; (-) strand; PAM type: YTN; PAM sequence: CTC
aatgggacctctcagtcctg

SEQ ID NO: 26026 - DNA, 20 bp, Artificial Sequence
  Description of Artificial Sequence: Synthetic oligonucleotide
  Target: COL7A1; (-) strand; PAM type: YTN; PAM sequence: CTG
agggatctcaatgggacctc

SEQ ID NO: 26027 - DNA, 20 bp, Artificial Sequence
  Description of Artificial Sequence: Synthetic oligonucleotide
  Target: COL7A1; (-) strand; PAM type: YTN; PAM sequence: CTG
tgcctgagggatctcaatgg

SEQ ID NO: 26028 - DNA, 20 bp, Artificial Sequence
  Description of Artificial Sequence: Synthetic oligonucleotide
  Target: COL7A1; (-) strand; PAM type: YTN; PAM sequence: CTC
agcaggggcccccatccatg

SEQ ID NO: 26029 - DNA, 20 bp, Artificial Sequence
  Description of Artificial Sequence: Synthetic oligonucleotide
  Target: COL7A1; (-) strand; PAM type: YTN; PAM sequence: TTG
ggagtctcagcaggggcccc

SEQ ID NO: 26030 - DNA, 20 bp, Artificial Sequence
  Description of Artificial Sequence: Synthetic oligonucleotide
  Target: COL7A1; (-) strand; PAM type: YTN; PAM sequence: CTT
gggagtctcagcaggggccc

SEQ ID NO: 26031 - DNA, 20 bp, Artificial Sequence
  Description of Artificial Sequence: Synthetic oligonucleotide
  Target: COL7A1; (-) strand; PAM type: YTN; PAM sequence: TTC
ccttgggagtctcagcaggg

SEQ ID NO: 26032 - DNA, 20 bp, Artificial Sequence
  Description of Artificial Sequence: Synthetic oligonucleotide
  Target: COL7A1; (-) strand; PAM type: YTN; PAM sequence: CTT
cccttgggagtctcagcagg

SEQ ID NO: 26033 - DNA, 20 bp, Artificial Sequence
  Description of Artificial Sequence: Synthetic oligonucleotide
  Target: COL7A1; (-) strand; PAM type: YTN; PAM sequence: TTC
ttcccttgggagtctcagca

SEQ ID NO: 26034 - DNA, 20 bp, Artificial Sequence
  Description of Artificial Sequence: Synthetic oligonucleotide
  Target: COL7A1; (-) strand; PAM type: YTN; PAM sequence: CTG
ggggttcttcccttgggagt

SEQ ID NO: 26035 - DNA, 20 bp, Artificial Sequence
  Description of Artificial Sequence: Synthetic oligonucleotide
  Target: COL7A1; (-) strand; PAM type: YTN; PAM sequence: CTC
caagtcctgggggttcttcc

SEQ ID NO: 26036 - DNA, 20 bp, Artificial Sequence
  Description of Artificial Sequence: Synthetic oligonucleotide
  Target: COL7A1; (-) strand; PAM type: YTN; PAM sequence: TTC
ataggccctccaagtcctgg

SEQ ID NO: 26037 - DNA, 20 bp, Artificial Sequence
  Description of Artificial Sequence: Synthetic oligonucleotide
  Target: COL7A1; (-) strand; PAM type: YTN; PAM sequence: CTT
cataggccctccaagtcctg

SEQ ID NO: 26038 - DNA, 20 bp, Artificial Sequence
  Description of Artificial Sequence: Synthetic oligonucleotide
  Target: COL7A1; (-) strand; PAM type: YTN; PAM sequence: TTG
ggggtcttcataggccctcc

SEQ ID NO: 26039 - DNA, 20 bp, Artificial Sequence
  Description of Artificial Sequence: Synthetic oligonucleotide
  Target: COL7A1; (-) strand; PAM type: YTN; PAM sequence: CTT
gggggtcttcataggccctc

SEQ ID NO: 26040 - DNA, 20 bp, Artificial Sequence
  Description of Artificial Sequence: Synthetic oligonucleotide
  Target: COL7A1; (-) strand; PAM type: YTN; PAM sequence: TTG
ccttgggggtcttcataggc

SEQ ID NO: 26041 - DNA, 20 bp, Artificial Sequence
  Description of Artificial Sequence: Synthetic oligonucleotide
  Target: COL7A1; (-) strand; PAM type: YTN; PAM sequence: TTT
gccttgggggtcttcatagg

SEQ ID NO: 26042 - DNA, 20 bp, Artificial Sequence
  Description of Artificial Sequence: Synthetic oligonucleotide
  Target: COL7A1; (-) strand; PAM type: YTN; PAM sequence: CTT
tgccttgggggtcttcatag

SEQ ID NO: 26043 - DNA, 20 bp, Artificial Sequence
  Description of Artificial Sequence: Synthetic oligonucleotide
  Target: COL7A1; (-) strand; PAM type: YTN; PAM sequence: TTC
tttgccttgggggtcttcat

SEQ ID NO: 26044 - DNA, 20 bp, Artificial Sequence
  Description of Artificial Sequence: Synthetic oligonucleotide
  Target: COL7A1; (-) strand; PAM type: YTN; PAM sequence: CTT
ctttgccttgggggtcttca

SEQ ID NO: 26045 - DNA, 20 bp, Artificial Sequence
  Description of Artificial Sequence: Synthetic oligonucleotide
  Target: COL7A1; (-) strand; PAM type: YTN; PAM sequence: CTG
accttctttgccttgggggt

SEQ ID NO: 26046 - DNA, 20 bp, Artificial Sequence
  Description of Artificial Sequence: Synthetic oligonucleotide
  Target: COL7A1; (-) strand; PAM type: YTN; PAM sequence: TTC
tgaccttctttgccttgggg

SEQ ID NO: 26047 - DNA, 20 bp, Artificial Sequence
  Description of Artificial Sequence: Synthetic oligonucleotide
  Target: COL7A1; (-) strand; PAM type: YTN; PAM sequence: TTT
ctgaccttctttgccttggg

SEQ ID NO: 26048 - DNA, 20 bp, Artificial Sequence
  Description of Artificial Sequence: Synthetic oligonucleotide
  Target: COL7A1; (-) strand; PAM type: YTN; PAM sequence: CTT
tctgaccttctttgccttgg

SEQ ID NO: 26049 - DNA, 20 bp, Artificial Sequence
  Description of Artificial Sequence: Synthetic oligonucleotide
  Target: COL7A1; (-) strand; PAM type: YTN; PAM sequence: TTA
gtagaatccccctttctgac

SEQ ID NO: 26050 - DNA, 20 bp, Artificial Sequence
  Description of Artificial Sequence: Synthetic oligonucleotide
  Target: COL7A1; (-) strand; PAM type: YTN; PAM sequence: TTT
agtagaatccccctttctga

SEQ ID NO: 26051 - DNA, 20 bp, Artificial Sequence
  Description of Artificial Sequence: Synthetic oligonucleotide
  Target: COL7A1; (-) strand; PAM type: YTN; PAM sequence: TTT
tagtagaatccccctttctg

SEQ ID NO: 26052 - DNA, 20 bp, Artificial Sequence
  Description of Artificial Sequence: Synthetic oligonucleotide
  Target: COL7A1; (-) strand; PAM type: YTN; PAM sequence: CTG
gcacacaggttttagtagaa

SEQ ID NO: 26053 - DNA, 20 bp, Artificial Sequence
  Description of Artificial Sequence: Synthetic oligonucleotide
  Target: COL7A1; (-) strand; PAM type: YTN; PAM sequence: CTC
agtccctggcacacaggttt

SEQ ID NO: 26054 - DNA, 20 bp, Artificial Sequence
  Description of Artificial Sequence: Synthetic oligonucleotide
  Target: COL7A1; (-) strand; PAM type: YTN; PAM sequence: TTG
ggagggtctcagtccctggc

SEQ ID NO: 26055 - DNA, 20 bp, Artificial Sequence
  Description of Artificial Sequence: Synthetic oligonucleotide
  Target: COL7A1; (-) strand; PAM type: YTN; PAM sequence: TTT
gggagggtctcagtccctgg

SEQ ID NO: 26056 - DNA, 20 bp, Artificial Sequence
  Description of Artificial Sequence: Synthetic oligonucleotide
  Target: COL7A1; (-) strand; PAM type: YTN; PAM sequence: CTT
tgggagggtctcagtccctg

SEQ ID NO: 26057 - DNA, 20 bp, Artificial Sequence
  Description of Artificial Sequence: Synthetic oligonucleotide
  Target: COL7A1; (-) strand; PAM type: YTN; PAM sequence: TTG
cctttgggagggtctcagtc

SEQ ID NO: 26058 - DNA, 20 bp, Artificial Sequence
  Description of Artificial Sequence: Synthetic oligonucleotide
  Target: COL7A1; (-) strand; PAM type: YTN; PAM sequence: CTT
gcctttgggagggtctcagt

SEQ ID NO: 26059 - DNA, 20 bp, Artificial Sequence
  Description of Artificial Sequence: Synthetic oligonucleotide
  Target: COL7A1; (-) strand; PAM type: YTN; PAM sequence: TTC
agccttgcctttgggagggt

SEQ ID NO: 26060 - DNA, 20 bp, Artificial Sequence
  Description of Artificial Sequence: Synthetic oligonucleotide
  Target: COL7A1; (-) strand; PAM type: YTN; PAM sequence: TTG
gtggggggtcggttcagcct

SEQ ID NO: 26061 - DNA, 20 bp, Artificial Sequence
  Description of Artificial Sequence: Synthetic oligonucleotide
  Target: COL7A1; (-) strand; PAM type: YTN; PAM sequence: CTC
caaccagatcatcatagtca

SEQ ID NO: 26062 - DNA, 20 bp, Artificial Sequence
  Description of Artificial Sequence: Synthetic oligonucleotide
  Target: COL7A1; (-) strand; PAM type: YTN; PAM sequence: CTG
cgtaagctccaaccagatca

SEQ ID NO: 26063 - DNA, 20 bp, Artificial Sequence
  Description of Artificial Sequence: Synthetic oligonucleotide
  Target: COL7A1; (-) strand; PAM type: YTN; PAM sequence: CTC
ggggctgcgtaagctccaac

SEQ ID NO: 26064 - DNA, 20 bp, Artificial Sequence
  Description of Artificial Sequence: Synthetic oligonucleotide
  Target: COL7A1; (-) strand; PAM type: YTN; PAM sequence: CTG
ggacagagggggctcggggc

SEQ ID NO: 26065 - DNA, 20 bp, Artificial Sequence
  Description of Artificial Sequence: Synthetic oligonucleotide
  Target: COL7A1; (-) strand; PAM type: YTN; PAM sequence: CTG
gggacccagggagagacgta

SEQ ID NO: 26066 - DNA, 20 bp, Artificial Sequence
  Description of Artificial Sequence: Synthetic oligonucleotide
  Target: COL7A1; (-) strand; PAM type: YTN; PAM sequence: CTG
caggcaaagctggggaccca

SEQ ID NO: 26067 - DNA, 20 bp, Artificial Sequence
  Description of Artificial Sequence: Synthetic oligonucleotide
  Target: COL7A1; (-) strand; PAM type: YTN; PAM sequence: CTC
agggtgctgcaggcaaagct

SEQ ID NO: 26068 - DNA, 20 bp, Artificial Sequence
  Description of Artificial Sequence: Synthetic oligonucleotide
  Target: COL7A1; (-) strand; PAM type: YTN; PAM sequence: CTC
ctcagggtgctgcaggcaaa

SEQ ID NO: 26069 - DNA, 20 bp, Artificial Sequence
  Description of Artificial Sequence: Synthetic oligonucleotide
  Target: COL7A1; (-) strand; PAM type: YTN; PAM sequence: CTC
tcctcagggtgctgcaggca

SEQ ID NO: 26070 - DNA, 20 bp, Artificial Sequence
  Description of Artificial Sequence: Synthetic oligonucleotide
  Target: COL7A1; (-) strand; PAM type: YTN; PAM sequence: TTG
agtctctcctcagggtgctg

SEQ ID NO: 26071 - DNA, 20 bp, Artificial Sequence
  Description of Artificial Sequence: Synthetic oligonucleotide
  Target: COL7A1; (-) strand; PAM type: YTN; PAM sequence: TTT
gagtctctcctcagggtgct

SEQ ID NO: 26072 - DNA, 20 bp, Artificial Sequence
  Description of Artificial Sequence: Synthetic oligonucleotide
  Target: COL7A1; (-) strand; PAM type: YTN; PAM sequence: CTT
tgagtctctcctcagggtgc

SEQ ID NO: 26073 - DNA, 20 bp, Artificial Sequence
  Description of Artificial Sequence: Synthetic oligonucleotide
  Target: COL7A1; (-) strand; PAM type: YTN; PAM sequence: CTG
actttgagtctctcctcagg

SEQ ID NO: 26074 - DNA, 20 bp, Artificial Sequence
  Description of Artificial Sequence: Synthetic oligonucleotide
  Target: COL7A1; (-) strand; PAM type: YTN; PAM sequence: CTG
accccatgaccatgatgaac

SEQ ID NO: 26075 - DNA, 20 bp, Artificial Sequence
  Description of Artificial Sequence: Synthetic oligonucleotide
  Target: COL7A1; (-) strand; PAM type: YTN; PAM sequence: CTA
gagcccctgaccccatgacc

SEQ ID NO: 26076 - DNA, 20 bp, Artificial Sequence
  Description of Artificial Sequence: Synthetic oligonucleotide
  Target: COL7A1; (-) strand; PAM type: YTN; PAM sequence: CTC
acagggactagagcccctga

SEQ ID NO: 26077 - DNA, 20 bp, Artificial Sequence
  Description of Artificial Sequence: Synthetic oligonucleotide
  Target: COL7A1; (-) strand; PAM type: YTN; PAM sequence: TTA
ggctcacagggactagagcc

SEQ ID NO: 26078 - DNA, 20 bp, Artificial Sequence
  Description of Artificial Sequence: Synthetic oligonucleotide
  Target: COL7A1; (-) strand; PAM type: YTN; PAM sequence: CTT
aggctcacagggactagagc

SEQ ID NO: 26079 - DNA, 20 bp, Artificial Sequence
  Description of Artificial Sequence: Synthetic oligonucleotide
  Target: COL7A1; (-) strand; PAM type: YTN; PAM sequence: TTG
ccatgcaggccttaggctca

SEQ ID NO: 26080 - DNA, 20 bp, Artificial Sequence
  Description of Artificial Sequence: Synthetic oligonucleotide
  Target: COL7A1; (-) strand; PAM type: YTN; PAM sequence: CTT
gccatgcaggccttaggctc

SEQ ID NO: 26081 - DNA, 20 bp, Artificial Sequence
  Description of Artificial Sequence: Synthetic oligonucleotide
  Target: COL7A1; (-) strand; PAM type: YTN; PAM sequence: TTC
ttgccatgcaggccttaggc

SEQ ID NO: 26082 - DNA, 20 bp, Artificial Sequence
  Description of Artificial Sequence: Synthetic oligonucleotide
  Target: COL7A1; (-) strand; PAM type: YTN; PAM sequence: CTG
ggtggggcatgttcttgcca

SEQ ID NO: 26083 - DNA, 20 bp, Artificial Sequence
  Description of Artificial Sequence: Synthetic oligonucleotide
  Target: COL7A1; (-) strand; PAM type: YTN; PAM sequence: CTG
cctgggtggggcatgttctt

SEQ ID NO: 26084 - DNA, 20 bp, Artificial Sequence
  Description of Artificial Sequence: Synthetic oligonucleotide
  Target: COL7A1; (-) strand; PAM type: YTN; PAM sequence: CTC
ccagagccctgcctgggtgg

SEQ ID NO: 26085 - DNA, 20 bp, Artificial Sequence
  Description of Artificial Sequence: Synthetic oligonucleotide
  Target: COL7A1; (-) strand; PAM type: YTN; PAM sequence: TTC
tcccagagccctgcctgggt

SEQ ID NO: 26086 - DNA, 20 bp, Artificial Sequence
  Description of Artificial Sequence: Synthetic oligonucleotide
  Target: COL7A1; (-) strand; PAM type: YTN; PAM sequence: CTT
ctcccagagccctgcctggg

SEQ ID NO: 26087 - DNA, 20 bp, Artificial Sequence
  Description of Artificial Sequence: Synthetic oligonucleotide
  Target: COL7A1; (-) strand; PAM type: YTN; PAM sequence: CTG
tgtcttctcccagagccctg

SEQ ID NO: 26088 - DNA, 20 bp, Artificial Sequence
  Description of Artificial Sequence: Synthetic oligonucleotide
  Target: COL7A1; (-) strand; PAM type: YTN; PAM sequence: TTG
tctgtgtcttctcccagagc

SEQ ID NO: 26089 - DNA, 20 bp, Artificial Sequence
  Description of Artificial Sequence: Synthetic oligonucleotide
  Target: COL7A1; (-) strand; PAM type: YTN; PAM sequence: CTG
ttgtctgtgtcttctcccag

SEQ ID NO: 26090 - DNA, 20 bp, Artificial Sequence
  Description of Artificial Sequence: Synthetic oligonucleotide
  Target: COL7A1; (-) strand; PAM type: YTN; PAM sequence: CTG
gggcgagacctgttgtctgt

SEQ ID NO: 26091 - DNA, 20 bp, Artificial Sequence
  Description of Artificial Sequence: Synthetic oligonucleotide
  Target: COL7A1; (-) strand; PAM type: YTN; PAM sequence: CTC
tggggcgagacctgttgtct

SEQ ID NO: 26092 - DNA, 20 bp, Artificial Sequence
  Description of Artificial Sequence: Synthetic oligonucleotide
  Target: COL7A1; (-) strand; PAM type: YTN; PAM sequence: TTG
acgagctctggggcgagacc

SEQ ID NO: 26093 - DNA, 20 bp, Artificial Sequence
  Description of Artificial Sequence: Synthetic oligonucleotide
  Target: COL7A1; (-) strand; PAM type: YTN; PAM sequence: CTT
gacgagctctggggcgagac

SEQ ID NO: 26094 - DNA, 20 bp, Artificial Sequence
  Description of Artificial Sequence: Synthetic oligonucleotide
  Target: COL7A1; (-) strand; PAM type: YTN; PAM sequence: TTG
gccttgacgagctctggggc

SEQ ID NO: 26095 - DNA, 20 bp, Artificial Sequence
  Description of Artificial Sequence: Synthetic oligonucleotide
  Target: COL7A1; (-) strand; PAM type: YTN; PAM sequence: CTT
ggccttgacgagctctgggg

SEQ ID NO: 26096 - DNA, 20 bp, Artificial Sequence
  Description of Artificial Sequence: Synthetic oligonucleotide
  Target: COL7A1; (-) strand; PAM type: YTN; PAM sequence: TTG
gtcttggccttgacgagctc

SEQ ID NO: 26097 - DNA, 20 bp, Artificial Sequence
  Description of Artificial Sequence: Synthetic oligonucleotide
  Target: COL7A1; (-) strand; PAM type: YTN; PAM sequence: TTG
gttggtcttggccttgacga

SEQ ID NO: 26098 - DNA, 20 bp, Artificial Sequence
  Description of Artificial Sequence: Synthetic oligonucleotide
  Target: COL7A1; (-) strand; PAM type: YTN; PAM sequence: CTC
attggttggtcttggccttg

SEQ ID NO: 26099 - DNA, 20 bp, Artificial Sequence
  Description of Artificial Sequence: Synthetic oligonucleotide
  Target: COL7A1; (-) strand; PAM type: YTN; PAM sequence: CTA
gaccccagcctcattggttg

SEQ ID NO: 26100 - DNA, 20 bp, Artificial Sequence
  Description of Artificial Sequence: Synthetic oligonucleotide
  Target: COL7A1; (-) strand; PAM type: YTN; PAM sequence: TTC
acatgaggaccctagacccc

SEQ ID NO: 26101 - DNA, 20 bp, Artificial Sequence
  Description of Artificial Sequence: Synthetic oligonucleotide
  Target: COL7A1; (-) strand; PAM type: YTN; PAM sequence: CTT
cacatgaggaccctagaccc

SEQ ID NO: 26102 - DNA, 20 bp, Artificial Sequence
  Description of Artificial Sequence: Synthetic oligonucleotide
  Target: COL7A1; (-) strand; PAM type: YTN; PAM sequence: CTA
ccccttcacatgaggaccct

SEQ ID NO: 26103 - DNA, 20 bp, Artificial Sequence
  Description of Artificial Sequence: Synthetic oligonucleotide
  Target: COL7A1; (-) strand; PAM type: YTN; PAM sequence: TTC
ccctaccccttcacatgagg

SEQ ID NO: 26104 - DNA, 20 bp, Artificial Sequence
  Description of Artificial Sequence: Synthetic oligonucleotide
  Target: COL7A1; (-) strand; PAM type: YTN; PAM sequence: CTT
cccctaccccttcacatgag

SEQ ID NO: 26105 - DNA, 20 bp, Artificial Sequence
  Description of Artificial Sequence: Synthetic oligonucleotide
  Target: COL7A1; (-) strand; PAM type: YTN; PAM sequence: TTG
tccccttcccctaccccttc

SEQ ID NO: 26106 - DNA, 20 bp, Artificial Sequence
  Description of Artificial Sequence: Synthetic oligonucleotide
  Target: COL7A1; (-) strand; PAM type: YTN; PAM sequence: CTG
gttgtccccttcccctaccc

SEQ ID NO: 26107 - DNA, 20 bp, Artificial Sequence
  Description of Artificial Sequence: Synthetic oligonucleotide
  Target: COL7A1; (-) strand; PAM type: YTN; PAM sequence: CTG
cctggttgtccccttcccct

SEQ ID NO: 26108 - DNA, 20 bp, Artificial Sequence
  Description of Artificial Sequence: Synthetic oligonucleotide
  Target: COL7A1; (-) strand; PAM type: YTN; PAM sequence: TTG
gtagtcctgcctggttgtcc

SEQ ID NO: 26109 - DNA, 20 bp, Artificial Sequence
  Description of Artificial Sequence: Synthetic oligonucleotide
  Target: COL7A1; (-) strand; PAM type: YTN; PAM sequence: CTT
ggtagtcctgcctggttgtc

SEQ ID NO: 26110 - DNA, 20 bp, Artificial Sequence
  Description of Artificial Sequence: Synthetic oligonucleotide
  Target: COL7A1; (-) strand; PAM type: YTN; PAM sequence: CTG
ggccgaatgtgagtcttggt

SEQ ID NO: 26111 - DNA, 20 bp, Artificial Sequence
  Description of Artificial Sequence: Synthetic oligonucleotide
  Target: COL7A1; (-) strand; PAM type: YTN; PAM sequence: CTC
tgggccgaatgtgagtcttg

SEQ ID NO: 26112 - DNA, 20 bp, Artificial Sequence
  Description of Artificial Sequence: Synthetic oligonucleotide
  Target: COL7A1; (-) strand; PAM type: YTN; PAM sequence: CTG
ggccctctgggccgaatgtg

SEQ ID NO: 26113 - DNA, 20 bp, Artificial Sequence
  Description of Artificial Sequence: Synthetic oligonucleotide
  Target: COL7A1; (-) strand; PAM type: YTN; PAM sequence: CTG
gatgggaaaccaggagccgc

SEQ ID NO: 26114 - DNA, 20 bp, Artificial Sequence
  Description of Artificial Sequence: Synthetic oligonucleotide
  Target: COL7A1; (-) strand; PAM type: YTN; PAM sequence: CTG
gatggccggagcggactgga

SEQ ID NO: 26115 - DNA, 20 bp, Artificial Sequence
  Description of Artificial Sequence: Synthetic oligonucleotide
  Target: COL7A1; (-) strand; PAM type: YTN; PAM sequence: CTG
ggctggatggccggagcgga

SEQ ID NO: 26116 - DNA, 20 bp, Artificial Sequence
  Description of Artificial Sequence: Synthetic oligonucleotide
  Target: COL7A1; (-) strand; PAM type: YTN; PAM sequence: TTC
cacagggtgaccggggtccc

SEQ ID NO: 26117 - DNA, 20 bp, Artificial Sequence
  Description of Artificial Sequence: Synthetic oligonucleotide
  Target: COL7A1; (-) strand; PAM type: YTN; PAM sequence: TTT
ccacagggtgaccggggtcc

SEQ ID NO: 26118 - DNA, 20 bp, Artificial Sequence
  Description of Artificial Sequence: Synthetic oligonucleotide
  Target: COL7A1; (-) strand; PAM type: YTN; PAM sequence: TTT
tccacagggtgaccggggtc

SEQ ID NO: 26119 - DNA, 20 bp, Artificial Sequence
  Description of Artificial Sequence: Synthetic oligonucleotide
  Target: COL7A1; (-) strand; PAM type: YTN; PAM sequence: CTA
ttttccacagggtgaccggg

SEQ ID NO: 26120 - DNA, 20 bp, Artificial Sequence
  Description of Artificial Sequence: Synthetic oligonucleotide
  Target: COL7A1; (-) strand; PAM type: YTN; PAM sequence: CTC
tattttccacagggtgaccg

SEQ ID NO: 26121 - DNA, 20 bp, Artificial Sequence
  Description of Artificial Sequence: Synthetic oligonucleotide
  Target: COL7A1; (-) strand; PAM type: YTN; PAM sequence: TTA
ccactctattttccacaggg

SEQ ID NO: 26122 - DNA, 20 bp, Artificial Sequence
  Description of Artificial Sequence: Synthetic oligonucleotide
  Target: COL7A1; (-) strand; PAM type: YTN; PAM sequence: CTT
accactctattttccacagg

SEQ ID NO: 26123 - DNA, 20 bp, Artificial Sequence
  Description of Artificial Sequence: Synthetic oligonucleotide
  Target: COL7A1; (-) strand; PAM type: YTN; PAM sequence: CTC
ttaccactctattttccaca

SEQ ID NO: 26124 - DNA, 20 bp, Artificial Sequence
  Description of Artificial Sequence: Synthetic oligonucleotide
  Target: COL7A1; (-) strand; PAM type: YTN; PAM sequence: TTG
gtggcctcttaccactctat

SEQ ID NO: 26125 - DNA, 20 bp, Artificial Sequence
  Description of Artificial Sequence: Synthetic oligonucleotide
  Target: COL7A1; (-) strand; PAM type: YTN; PAM sequence: CTT
ggtggcctcttaccactcta

SEQ ID NO: 26126 - DNA, 20 bp, Artificial Sequence
  Description of Artificial Sequence: Synthetic oligonucleotide
  Target: COL7A1; (-) strand; PAM type: YTN; PAM sequence: CTC
agccttggtggcctcttacc

SEQ ID NO: 26127 - DNA, 20 bp, Artificial Sequence
  Description of Artificial Sequence: Synthetic oligonucleotide
  Target: COL7A1; (-) strand; PAM type: YTN; PAM sequence: TTA
tcagatccacctcagccttg

SEQ ID NO: 26128 - DNA, 20 bp, Artificial Sequence
  Description of Artificial Sequence: Synthetic oligonucleotide
  Target: COL7A1; (-) strand; PAM type: YTN; PAM sequence: CTG
ggttatcagatccacctcag

SEQ ID NO: 26129 - DNA, 20 bp, Artificial Sequence
  Description of Artificial Sequence: Synthetic oligonucleotide
  Target: COL7A1; (-) strand; PAM type: YTN; PAM sequence: CTC
aggacatgagcctgggttat

SEQ ID NO: 26130 - DNA, 20 bp, Artificial Sequence
  Description of Artificial Sequence: Synthetic oligonucleotide
  Target: COL7A1; (-) strand; PAM type: YTN; PAM sequence: TTC
tcaggacatgagcctgggtt

SEQ ID NO: 26131 - DNA, 20 bp, Artificial Sequence
  Description of Artificial Sequence: Synthetic oligonucleotide
  Target: COL7A1; (-) strand; PAM type: YTN; PAM sequence: TTT
ctcaggacatgagcctgggt

SEQ ID NO: 26132 - DNA, 20 bp, Artificial Sequence
  Description of Artificial Sequence: Synthetic oligonucleotide
  Target: COL7A1; (-) strand; PAM type: YTN; PAM sequence: CTC
cagggggacccaggtgtccg

SEQ ID NO: 26133 - DNA, 20 bp, Artificial Sequence
  Description of Artificial Sequence: Synthetic oligonucleotide
  Target: COL7A1; (-) strand; PAM type: YTN; PAM sequence: TTC
cctccagggggacccaggtg

SEQ ID NO: 26134 - DNA, 20 bp, Artificial Sequence
  Description of Artificial Sequence: Synthetic oligonucleotide
  Target: COL7A1; (-) strand; PAM type: YTN; PAM sequence: CTG
ttccctccagggggacccag

SEQ ID NO: 26135 - DNA, 20 bp, Artificial Sequence
  Description of Artificial Sequence: Synthetic oligonucleotide
  Target: COL7A1; (-) strand; PAM type: YTN; PAM sequence: CTG
accctgttccctccaggggg

SEQ ID NO: 26136 - DNA, 20 bp, Artificial Sequence
  Description of Artificial Sequence: Synthetic oligonucleotide
  Target: COL7A1; (-) strand; PAM type: YTN; PAM sequence: TTA
tctgaccctgttccctccag

SEQ ID NO: 26137 - DNA, 20 bp, Artificial Sequence
  Description of Artificial Sequence: Synthetic oligonucleotide
  Target: COL7A1; (-) strand; PAM type: YTN; PAM sequence: CTT
atctgaccctgttccctcca

SEQ ID NO: 26138 - DNA, 20 bp, Artificial Sequence
  Description of Artificial Sequence: Synthetic oligonucleotide
  Target: COL7A1; (-) strand; PAM type: YTN; PAM sequence: CTC
ttatctgaccctgttccctc

SEQ ID NO: 26139 - DNA, 20 bp, Artificial Sequence
  Description of Artificial Sequence: Synthetic oligonucleotide
  Target: COL7A1; (-) strand; PAM type: YTN; PAM sequence: CTC
acctcttatctgaccctgtt

SEQ ID NO: 26140 - DNA, 20 bp, Artificial Sequence
  Description of Artificial Sequence: Synthetic oligonucleotide
  Target: COL7A1; (-) strand; PAM type: YTN; PAM sequence: TTA
ccctcacctcttatctgacc

SEQ ID NO: 26141 - DNA, 20 bp, Artificial Sequence
  Description of Artificial Sequence: Synthetic oligonucleotide
  Target: COL7A1; (-) strand; PAM type: YTN; PAM sequence: CTT
accctcacctcttatctgac

SEQ ID NO: 26142 - DNA, 20 bp, Artificial Sequence
  Description of Artificial Sequence: Synthetic oligonucleotide
  Target: COL7A1; (-) strand; PAM type: YTN; PAM sequence: CTG
ccaagtccccatcttaccct

SEQ ID NO: 26143 - DNA, 20 bp, Artificial Sequence
  Description of Artificial Sequence: Synthetic oligonucleotide
  Target: COL7A1; (-) strand; PAM type: YTN; PAM sequence: TTG
ccccgtctgccaagtcccca

SEQ ID NO: 26144 - DNA, 20 bp, Artificial Sequence
  Description of Artificial Sequence: Synthetic oligonucleotide
  Target: COL7A1; (-) strand; PAM type: YTN; PAM sequence: TTT
gccccgtctgccaagtcccc

SEQ ID NO: 26145 - DNA, 20 bp, Artificial Sequence
  Description of Artificial Sequence: Synthetic oligonucleotide
  Target: COL7A1; (-) strand; PAM type: YTN; PAM sequence: CTT
tgccccgtctgccaagtccc

SEQ ID NO: 26146 - DNA, 20 bp, Artificial Sequence
  Description of Artificial Sequence: Synthetic oligonucleotide
  Target: COL7A1; (-) strand; PAM type: YTN; PAM sequence: TTC
ggggacccccaggcccacag

SEQ ID NO: 26147 - DNA, 20 bp, Artificial Sequence
  Description of Artificial Sequence: Synthetic oligonucleotide
  Target: COL7A1; (-) strand; PAM type: YTN; PAM sequence: TTT
cggggacccccaggcccaca

SEQ ID NO: 26148 - DNA, 20 bp, Artificial Sequence
  Description of Artificial Sequence: Synthetic oligonucleotide
  Target: COL7A1; (-) strand; PAM type: YTN; PAM sequence: TTG
aagggtttcggggaccccca

SEQ ID NO: 26149 - DNA, 20 bp, Artificial Sequence
  Description of Artificial Sequence: Synthetic oligonucleotide
  Target: COL7A1; (-) strand; PAM type: YTN; PAM sequence: CTC
agggcattgaagggtttcgg

SEQ ID NO: 26150 - DNA, 20 bp, Artificial Sequence
  Description of Artificial Sequence: Synthetic oligonucleotide
  Target: COL7A1; (-) strand; PAM type: YTN; PAM sequence: CTA
tcctcagggcattgaagggt

SEQ ID NO: 26151 - DNA, 20 bp, Artificial Sequence
  Description of Artificial Sequence: Synthetic oligonucleotide
  Target: COL7A1; (-) strand; PAM type: YTN; PAM sequence: CTC
ccctatcctcagggcattga

SEQ ID NO: 26152 - DNA, 20 bp, Artificial Sequence
  Description of Artificial Sequence: Synthetic oligonucleotide
  Target: COL7A1; (-) strand; PAM type: YTN; PAM sequence: TTC
ctcccctatcctcagggcat

SEQ ID NO: 26153 - DNA, 20 bp, Artificial Sequence
  Description of Artificial Sequence: Synthetic oligonucleotide
  Target: COL7A1; (-) strand; PAM type: YTN; PAM sequence: CTT
cctcccctatcctcagggca

SEQ ID NO: 26154 - DNA, 20 bp, Artificial Sequence
  Description of Artificial Sequence: Synthetic oligonucleotide
  Target: COL7A1; (-) strand; PAM type: YTN; PAM sequence: TTC
ttcctcccctatcctcaggg

SEQ ID NO: 26155 - DNA, 20 bp, Artificial Sequence
  Description of Artificial Sequence: Synthetic oligonucleotide
  Target: COL7A1; (-) strand; PAM type: YTN; PAM sequence: TTT
cttcctcccctatcctcagg

SEQ ID NO: 26156 - DNA, 20 bp, Artificial Sequence
  Description of Artificial Sequence: Synthetic oligonucleotide
  Target: COL7A1; (-) strand; PAM type: YTN; PAM sequence: CTG
atttcttcctcccctatcct

SEQ ID NO: 26157 - DNA, 20 bp, Artificial Sequence
  Description of Artificial Sequence: Synthetic oligonucleotide
  Target: COL7A1; (-) strand; PAM type: YTN; PAM sequence: CTC
tgatttcttcctcccctatc

SEQ ID NO: 26158 - DNA, 20 bp, Artificial Sequence
  Description of Artificial Sequence: Synthetic oligonucleotide
  Target: COL7A1; (-) strand; PAM type: YTN; PAM sequence: CTG
ctctgatttcttcctcccct

SEQ ID NO: 26159 - DNA, 20 bp, Artificial Sequence
  Description of Artificial Sequence: Synthetic oligonucleotide
  Target: COL7A1; (-) strand; PAM type: YTN; PAM sequence: CTC
gggggtgcaggcatgggagg

SEQ ID NO: 26160 - DNA, 20 bp, Artificial Sequence
  Description of Artificial Sequence: Synthetic oligonucleotide
  Target: COL7A1; (-) strand; PAM type: YTN; PAM sequence: TTG
gtcctcgggggtgcaggcat

SEQ ID NO: 26161 - DNA, 20 bp, Artificial Sequence
  Description of Artificial Sequence: Synthetic oligonucleotide
  Target: COL7A1; (-) strand; PAM type: YTN; PAM sequence: CTG
gggaaagggtgagtgtgatt

SEQ ID NO: 26162 - DNA, 20 bp, Artificial Sequence
  Description of Artificial Sequence: Synthetic oligonucleotide
  Target: COL7A1; (-) strand; PAM type: YTN; PAM sequence: CTG
gagcccctggggaaagggtg

SEQ ID NO: 26163 - DNA, 20 bp, Artificial Sequence
  Description of Artificial Sequence: Synthetic oligonucleotide
  Target: COL7A1; (-) strand; PAM type: YTN; PAM sequence: CTC
cctggagcccctggggaaag

SEQ ID NO: 26164 - DNA, 20 bp, Artificial Sequence
  Description of Artificial Sequence: Synthetic oligonucleotide
  Target: COL7A1; (-) strand; PAM type: YTN; PAM sequence: CTG
gcctccctggagcccctggg

SEQ ID NO: 26165 - DNA, 20 bp, Artificial Sequence
  Description of Artificial Sequence: Synthetic oligonucleotide
  Target: COL7A1; (-) strand; PAM type: YTN; PAM sequence: CTC
gagggcccaagggtgatcct

SEQ ID NO: 26166 - DNA, 20 bp, Artificial Sequence
  Description of Artificial Sequence: Synthetic oligonucleotide
  Target: COL7A1; (-) strand; PAM type: YTN; PAM sequence: CTG
gggaccgcggacaagagggt

SEQ ID NO: 26167 - DNA, 20 bp, Artificial Sequence
  Description of Artificial Sequence: Synthetic oligonucleotide
  Target: COL7A1; (-) strand; PAM type: YTN; PAM sequence: CTG
ccacagggagagcctgggga

SEQ ID NO: 26168 - DNA, 20 bp, Artificial Sequence
  Description of Artificial Sequence: Synthetic oligonucleotide
  Target: COL7A1; (-) strand; PAM type: YTN; PAM sequence: CTC
tgccacagggagagcctggg

SEQ ID NO: 26169 - DNA, 20 bp, Artificial Sequence
  Description of Artificial Sequence: Synthetic oligonucleotide
  Target: COL7A1; (-) strand; PAM type: YTN; PAM sequence: TTA
tctctgccacagggagagcc

SEQ ID NO: 26170 - DNA, 20 bp, Artificial Sequence
  Description of Artificial Sequence: Synthetic oligonucleotide
  Target: COL7A1; (-) strand; PAM type: YTN; PAM sequence: CTT
atctctgccacagggagagc

SEQ ID NO: 26171 - DNA, 20 bp, Artificial Sequence
  Description of Artificial Sequence: Synthetic oligonucleotide
  Target: COL7A1; (-) strand; PAM type: YTN; PAM sequence: CTC
agcaagcttatctctgccac

SEQ ID NO: 26172 - DNA, 20 bp, Artificial Sequence
  Description of Artificial Sequence: Synthetic oligonucleotide
  Target: COL7A1; (-) strand; PAM type: YTN; PAM sequence: TTC
ctcagcaagcttatctctgc

SEQ ID NO: 26173 - DNA, 20 bp, Artificial Sequence
  Description of Artificial Sequence: Synthetic oligonucleotide
  Target: COL7A1; (-) strand; PAM type: YTN; PAM sequence: CTG
ttcctcagcaagcttatctc

SEQ ID NO: 26174 - DNA, 20 bp, Artificial Sequence
  Description of Artificial Sequence: Synthetic oligonucleotide
  Target: COL7A1; (-) strand; PAM type: YTN; PAM sequence: TTC
aaggctgttcctcagcaagc

SEQ ID NO: 26175 - DNA, 20 bp, Artificial Sequence
  Description of Artificial Sequence: Synthetic oligonucleotide
  Target: COL7A1; (-) strand; PAM type: YTN; PAM sequence: CTT
caaggctgttcctcagcaag

SEQ ID NO: 26176 - DNA, 20 bp, Artificial Sequence
  Description of Artificial Sequence: Synthetic oligonucleotide
  Target: COL7A1; (-) strand; PAM type: YTN; PAM sequence: TTG
gcttcaaggctgttcctcag

SEQ ID NO: 26177 - DNA, 20 bp, Artificial Sequence
  Description of Artificial Sequence: Synthetic oligonucleotide
  Target: COL7A1; (-) strand; PAM type: YTN; PAM sequence: CTT
ggcttcaaggctgttcctca

SEQ ID NO: 26178 - DNA, 20 bp, Artificial Sequence
  Description of Artificial Sequence: Synthetic oligonucleotide
  Target: COL7A1; (-) strand; PAM type: YTN; PAM sequence: TTG
ggcatggcttggcttcaagg

SEQ ID NO: 26179 - DNA, 20 bp, Artificial Sequence
  Description of Artificial Sequence: Synthetic oligonucleotide
  Target: COL7A1; (-) strand; PAM type: YTN; PAM sequence: CTT
gggcatggcttggcttcaag

SEQ ID NO: 26180 - DNA, 20 bp, Artificial Sequence
  Description of Artificial Sequence: Synthetic oligonucleotide
  Target: COL7A1; (-) strand; PAM type: YTN; PAM sequence: CTA
ccttgggcatggcttggctt

SEQ ID NO: 26181 - DNA, 20 bp, Artificial Sequence
  Description of Artificial Sequence: Synthetic oligonucleotide
  Target: COL7A1; (-) strand; PAM type: YTN; PAM sequence: TTC
taccttgggcatggcttggc

SEQ ID NO: 26182 - DNA, 20 bp, Artificial Sequence
  Description of Artificial Sequence: Synthetic oligonucleotide
  Target: COL7A1; (-) strand; PAM type: YTN; PAM sequence: CTC
ccagcaggttctaccttggg

SEQ ID NO: 26183 - DNA, 20 bp, Artificial Sequence
  Description of Artificial Sequence: Synthetic oligonucleotide
  Target: COL7A1; (-) strand; PAM type: YTN; PAM sequence: CTG
tgggtggagggtaagaaaga

SEQ ID NO: 26184 - DNA, 20 bp, Artificial Sequence
  Description of Artificial Sequence: Synthetic oligonucleotide
  Target: COL7A1; (-) strand; PAM type: YTN; PAM sequence: TTA
gggtctgtgggtggagggta

SEQ ID NO: 26185 - DNA, 20 bp, Artificial Sequence
  Description of Artificial Sequence: Synthetic oligonucleotide
  Target: COL7A1; (-) strand; PAM type: YTN; PAM sequence: CTG
gagccagagagaaggtatta

SEQ ID NO: 26186 - DNA, 20 bp, Artificial Sequence
  Description of Artificial Sequence: Synthetic oligonucleotide
  Target: COL7A1; (-) strand; PAM type: YTN; PAM sequence: TTC
cccccacaggtagacacagg

SEQ ID NO: 26187 - DNA, 20 bp, Artificial Sequence
  Description of Artificial Sequence: Synthetic oligonucleotide
  Target: COL7A1; (-) strand; PAM type: YTN; PAM sequence: CTG
gtcattccccccacaggtag

SEQ ID NO: 26188 - DNA, 20 bp, Artificial Sequence
  Description of Artificial Sequence: Synthetic oligonucleotide
  Target: COL7A1; (-) strand; PAM type: YTN; PAM sequence: CTC
actggtcattccccccacag

SEQ ID NO: 26189 - DNA, 20 bp, Artificial Sequence
  Description of Artificial Sequence: Synthetic oligonucleotide
  Target: COL7A1; (-) strand; PAM type: YTN; PAM sequence: TTC
tcactggtcattccccccac

SEQ ID NO: 26190 - DNA, 20 bp, Artificial Sequence
  Description of Artificial Sequence: Synthetic oligonucleotide
  Target: COL7A1; (-) strand; PAM type: YTN; PAM sequence: CTT
ctcactggtcattcccccca

SEQ ID NO: 26191 - DNA, 20 bp, Artificial Sequence
  Description of Artificial Sequence: Synthetic oligonucleotide
  Target: COL7A1; (-) strand; PAM type: YTN; PAM sequence: TTC
ttctcactggtcattccccc

SEQ ID NO: 26192 - DNA, 20 bp, Artificial Sequence
  Description of Artificial Sequence: Synthetic oligonucleotide
  Target: COL7A1; (-) strand; PAM type: YTN; PAM sequence: TTG
agccattcttctcactggtc

SEQ ID NO: 26193 - DNA, 20 bp, Artificial Sequence
  Description of Artificial Sequence: Synthetic oligonucleotide
  Target: COL7A1; (-) strand; PAM type: YTN; PAM sequence: TTG
ttgagccattcttctcactg

SEQ ID NO: 26194 - DNA, 20 bp, Artificial Sequence
  Description of Artificial Sequence: Synthetic oligonucleotide
  Target: COL7A1; (-) strand; PAM type: YTN; PAM sequence: CTT
gttgagccattcttctcact

SEQ ID NO: 26195 - DNA, 20 bp, Artificial Sequence
  Description of Artificial Sequence: Synthetic oligonucleotide
  Target: COL7A1; (-) strand; PAM type: YTN; PAM sequence: TTC
cccttgttgagccattcttc

SEQ ID NO: 26196 - DNA, 20 bp, Artificial Sequence
  Description of Artificial Sequence: Synthetic oligonucleotide
  Target: COL7A1; (-) strand; PAM type: YTN; PAM sequence: CTT
ccccttgttgagccattctt

SEQ ID NO: 26197 - DNA, 20 bp, Artificial Sequence
  Description of Artificial Sequence: Synthetic oligonucleotide
  Target: COL7A1; (-) strand; PAM type: YTN; PAM sequence: CTC
ttccccttgttgagccattc

SEQ ID NO: 26198 - DNA, 20 bp, Artificial Sequence
  Description of Artificial Sequence: Synthetic oligonucleotide
  Target: COL7A1; (-) strand; PAM type: YTN; PAM sequence: CTC
ctcttccccttgttgagcca

SEQ ID NO: 26199 - DNA, 20 bp, Artificial Sequence
  Description of Artificial Sequence: Synthetic oligonucleotide
  Target: COL7A1; (-) strand; PAM type: YTN; PAM sequence: CTC
gccaactcctcttccccttg

SEQ ID NO: 26200 - DNA, 20 bp, Artificial Sequence
  Description of Artificial Sequence: Synthetic oligonucleotide
  Target: COL7A1; (-) strand; PAM type: YTN; PAM sequence: CTG
tatcccctcgccaactcctc

SEQ ID NO: 26201 - DNA, 20 bp, Artificial Sequence
  Description of Artificial Sequence: Synthetic oligonucleotide
  Target: COL7A1; (-) strand; PAM type: YTN; PAM sequence: CTC
acagaccctgtatcccctcg

SEQ ID NO: 26202 - DNA, 20 bp, Artificial Sequence
  Description of Artificial Sequence: Synthetic oligonucleotide
  Target: COL7A1; (-) strand; PAM type: YTN; PAM sequence: CTG
gagcccctcacagaccctgt

SEQ ID NO: 26203 - DNA, 20 bp, Artificial Sequence
  Description of Artificial Sequence: Synthetic oligonucleotide
  Target: COL7A1; (-) strand; PAM type: YTN; PAM sequence: CTC
cgcggatccctggagcccct

SEQ ID NO: 26204 - DNA, 20 bp, Artificial Sequence
  Description of Artificial Sequence: Synthetic oligonucleotide
  Target: COL7A1; (-) strand; PAM type: YTN; PAM sequence: CTG
aaacctccgcggatccctgg

SEQ ID NO: 26205 - DNA, 20 bp, Artificial Sequence
  Description of Artificial Sequence: Synthetic oligonucleotide
  Target: COL7A1; (-) strand; PAM type: YTN; PAM sequence: CTC
tgaaacctccgcggatccct

SEQ ID NO: 26206 - DNA, 20 bp, Artificial Sequence
  Description of Artificial Sequence: Synthetic oligonucleotide
  Target: COL7A1; (-) strand; PAM type: YTN; PAM sequence: CTG
tccctctgaaacctccgcgg

SEQ ID NO: 26207 - DNA, 20 bp, Artificial Sequence
  Description of Artificial Sequence: Synthetic oligonucleotide
  Target: COL7A1; (-) strand; PAM type: YTN; PAM sequence: TTC
ccccactgtccctctgaaac

SEQ ID NO: 26208 - DNA, 20 bp, Artificial Sequence
  Description of Artificial Sequence: Synthetic oligonucleotide
  Target: COL7A1; (-) strand; PAM type: YTN; PAM sequence: CTT
cccccactgtccctctgaaa

SEQ ID NO: 26209 - DNA, 20 bp, Artificial Sequence
  Description of Artificial Sequence: Synthetic oligonucleotide
  Target: COL7A1; (-) strand; PAM type: YTN; PAM sequence: CTC
ccacttcccccactgtccct

SEQ ID NO: 26210 - DNA, 20 bp, Artificial Sequence
  Description of Artificial Sequence: Synthetic oligonucleotide
  Target: COL7A1; (-) strand; PAM type: YTN; PAM sequence: CTA
actcccacttcccccactgt

SEQ ID NO: 26211 - DNA, 20 bp, Artificial Sequence
  Description of Artificial Sequence: Synthetic oligonucleotide
  Target: COL7A1; (-) strand; PAM type: YTN; PAM sequence: TTC
cactaactcccacttccccc

SEQ ID NO: 26212 - DNA, 20 bp, Artificial Sequence
  Description of Artificial Sequence: Synthetic oligonucleotide
  Target: COL7A1; (-) strand; PAM type: YTN; PAM sequence: CTT
ccactaactcccacttcccc

SEQ ID NO: 26213 - DNA, 20 bp, Artificial Sequence
  Description of Artificial Sequence: Synthetic oligonucleotide
  Target: COL7A1; (-) strand; PAM type: YTN; PAM sequence: TTC
cttccactaactcccacttc

SEQ ID NO: 26214 - DNA, 20 bp, Artificial Sequence
  Description of Artificial Sequence: Synthetic oligonucleotide
  Target: COL7A1; (-) strand; PAM type: YTN; PAM sequence: CTC
attccttccactaactccca

SEQ ID NO: 26215 - DNA, 20 bp, Artificial Sequence
  Description of Artificial Sequence: Synthetic oligonucleotide
  Target: COL7A1; (-) strand; PAM type: YTN; PAM sequence: CTC
cacatcatgtcccctcattc

SEQ ID NO: 26216 - DNA, 20 bp, Artificial Sequence
  Description of Artificial Sequence: Synthetic oligonucleotide
  Target: COL7A1; (-) strand; PAM type: YTN; PAM sequence: TTG
gctccacatcatgtcccctc

SEQ ID NO: 26217 - DNA, 20 bp, Artificial Sequence
  Description of Artificial Sequence: Synthetic oligonucleotide
  Target: COL7A1; (-) strand; PAM type: YTN; PAM sequence: TTT
ggctccacatcatgtcccct

SEQ ID NO: 26218 - DNA, 20 bp, Artificial Sequence
  Description of Artificial Sequence: Synthetic oligonucleotide
  Target: COL7A1; (-) strand; PAM type: YTN; PAM sequence: CTT
tggctccacatcatgtcccc

SEQ ID NO: 26219 - DNA, 20 bp, Artificial Sequence
  Description of Artificial Sequence: Synthetic oligonucleotide
  Target: COL7A1; (-) strand; PAM type: YTN; PAM sequence: TTG
cccctttggctccacatcat

SEQ ID NO: 26220 - DNA, 20 bp, Artificial Sequence
  Description of Artificial Sequence: Synthetic oligonucleotide
  Target: COL7A1; (-) strand; PAM type: YTN; PAM sequence: CTT
gcccctttggctccacatca

SEQ ID NO: 26221 - DNA, 20 bp, Artificial Sequence
  Description of Artificial Sequence: Synthetic oligonucleotide
  Target: COL7A1; (-) strand; PAM type: YTN; PAM sequence: CTC
acttgcccctttggctccac

SEQ ID NO: 26222 - DNA, 20 bp, Artificial Sequence
  Description of Artificial Sequence: Synthetic oligonucleotide
  Target: COL7A1; (-) strand; PAM type: YTN; PAM sequence: TTC
tcacttgcccctttggctcc

SEQ ID NO: 26223 - DNA, 20 bp, Artificial Sequence
  Description of Artificial Sequence: Synthetic oligonucleotide
  Target: COL7A1; (-) strand; PAM type: YTN; PAM sequence: TTG
ttctcacttgcccctttggc

SEQ ID NO: 26224 - DNA, 20 bp, Artificial Sequence
  Description of Artificial Sequence: Synthetic oligonucleotide
  Target: COL7A1; (-) strand; PAM type: YTN; PAM sequence: CTG
tcattgttctcacttgcccc

SEQ ID NO: 26225 - DNA, 20 bp, Artificial Sequence
  Description of Artificial Sequence: Synthetic oligonucleotide
  Target: COL7A1; (-) strand; PAM type: YTN; PAM sequence: CTC
tgtcattgttctcacttgcc

SEQ ID NO: 26226 - DNA, 20 bp, Artificial Sequence
  Description of Artificial Sequence: Synthetic oligonucleotide
  Target: COL7A1; (-) strand; PAM type: YTN; PAM sequence: CTG
gtcctctgtcattgttctca

SEQ ID NO: 26227 - DNA, 20 bp, Artificial Sequence
  Description of Artificial Sequence: Synthetic oligonucleotide
  Target: COL7A1; (-) strand; PAM type: YTN; PAM sequence: CTG
ggtctggtcctctgtcattg

SEQ ID NO: 26228 - DNA, 20 bp, Artificial Sequence
  Description of Artificial Sequence: Synthetic oligonucleotide
  Target: COL7A1; (-) strand; PAM type: YTN; PAM sequence: CTG
cgctgggtctggtcctctgt

SEQ ID NO: 26229 - DNA, 20 bp, Artificial Sequence
  Description of Artificial Sequence: Synthetic oligonucleotide
  Target: COL7A1; (-) strand; PAM type: YTN; PAM sequence: CTG
gtaagggctgcgctgggtct

SEQ ID NO: 26230 - DNA, 20 bp, Artificial Sequence
  Description of Artificial Sequence: Synthetic oligonucleotide
  Target: COL7A1; (-) strand; PAM type: YTN; PAM sequence: TTC
ccagggtcccccaggacccc

SEQ ID NO: 26231 - DNA, 20 bp, Artificial Sequence
  Description of Artificial Sequence: Synthetic oligonucleotide
  Target: COL7A1; (-) strand; PAM type: YTN; PAM sequence: TTT
cccagggtcccccaggaccc

SEQ ID NO: 26232 - DNA, 20 bp, Artificial Sequence
  Description of Artificial Sequence: Synthetic oligonucleotide
  Target: COL7A1; (-) strand; PAM type: YTN; PAM sequence: CTT
tcccagggtcccccaggacc

SEQ ID NO: 26233 - DNA, 20 bp, Artificial Sequence
  Description of Artificial Sequence: Synthetic oligonucleotide
  Target: COL7A1; (-) strand; PAM type: YTN; PAM sequence: TTC
ctttcccagggtcccccagg

SEQ ID NO: 26234 - DNA, 20 bp, Artificial Sequence
  Description of Artificial Sequence: Synthetic oligonucleotide
  Target: COL7A1; (-) strand; PAM type: YTN; PAM sequence: TTT
cctttcccagggtcccccag

SEQ ID NO: 26235 - DNA, 20 bp, Artificial Sequence
  Description of Artificial Sequence: Synthetic oligonucleotide
  Target: COL7A1; (-) strand; PAM type: YTN; PAM sequence: CTA
taatcatttcctttcccagg

SEQ ID NO: 26236 - DNA, 20 bp, Artificial Sequence
  Description of Artificial Sequence: Synthetic oligonucleotide
  Target: COL7A1; (-) strand; PAM type: YTN; PAM sequence: TTG
actataatcatttcctttcc

SEQ ID NO: 26237 - DNA, 20 bp, Artificial Sequence
  Description of Artificial Sequence: Synthetic oligonucleotide
  Target: COL7A1; (-) strand; PAM type: YTN; PAM sequence: CTA
ttgactataatcatttcctt

SEQ ID NO: 26238 - DNA, 20 bp, Artificial Sequence
  Description of Artificial Sequence: Synthetic oligonucleotide
  Target: COL7A1; (-) strand; PAM type: YTN; PAM sequence: CTC
ctattgactataatcatttc

SEQ ID NO: 26239 - DNA, 20 bp, Artificial Sequence
  Description of Artificial Sequence: Synthetic oligonucleotide
  Target: COL7A1; (-) strand; PAM type: YTN; PAM sequence: CTG
agggctcctattgactataa

SEQ ID NO: 26240 - DNA, 20 bp, Artificial Sequence
  Description of Artificial Sequence: Synthetic oligonucleotide
  Target: COL7A1; (-) strand; PAM type: YTN; PAM sequence: CTG
ggacctgagggctcctattg

SEQ ID NO: 26241 - DNA, 20 bp, Artificial Sequence
  Description of Artificial Sequence: Synthetic oligonucleotide
  Target: COL7A1; (-) strand; PAM type: YTN; PAM sequence: CTG
gggcaaaccagagccatggc

SEQ ID NO: 26242 - DNA, 20 bp, Artificial Sequence
  Description of Artificial Sequence: Synthetic oligonucleotide
  Target: COL7A1; (-) strand; PAM type: YTN; PAM sequence: TTG
agcctggggcaaaccagagc

SEQ ID NO: 26243 - DNA, 20 bp, Artificial Sequence
  Description of Artificial Sequence: Synthetic oligonucleotide
  Target: COL7A1; (-) strand; PAM type: YTN; PAM sequence: TTG
ggggcagagttgagcctggg

SEQ ID NO: 26244 - DNA, 20 bp, Artificial Sequence
  Description of Artificial Sequence: Synthetic oligonucleotide
  Target: COL7A1; (-) strand; PAM type: YTN; PAM sequence: CTT
gggggcagagttgagcctgg

SEQ ID NO: 26245 - DNA, 20 bp, Artificial Sequence
  Description of Artificial Sequence: Synthetic oligonucleotide
  Target: COL7A1; (-) strand; PAM type: YTN; PAM sequence: TTC
ggggaacttgggggcagagt

SEQ ID NO: 26246 - DNA, 20 bp, Artificial Sequence
  Description of Artificial Sequence: Synthetic oligonucleotide
  Target: COL7A1; (-) strand; PAM type: YTN; PAM sequence: CTT
cggggaacttgggggcagag

SEQ ID NO: 26247 - DNA, 20 bp, Artificial Sequence
  Description of Artificial Sequence: Synthetic oligonucleotide
  Target: COL7A1; (-) strand; PAM type: YTN; PAM sequence: TTG
gggtgcttcggggaacttgg

SEQ ID NO: 26248 - DNA, 20 bp, Artificial Sequence
  Description of Artificial Sequence: Synthetic oligonucleotide
  Target: COL7A1; (-) strand; PAM type: YTN; PAM sequence: CTG
gcattggggtgcttcgggga

SEQ ID NO: 26249 - DNA, 20 bp, Artificial Sequence
  Description of Artificial Sequence: Synthetic oligonucleotide
  Target: COL7A1; (-) strand; PAM type: YTN; PAM sequence: CTG
ggggctggcattggggtgct

SEQ ID NO: 26250 - DNA, 20 bp, Artificial Sequence
  Description of Artificial Sequence: Synthetic oligonucleotide
  Target: COL7A1; (-) strand; PAM type: YTN; PAM sequence: CTG
ctgggggctggcattggggt

SEQ ID NO: 26251 - DNA, 20 bp, Artificial Sequence
  Description of Artificial Sequence: Synthetic oligonucleotide
  Target: COL7A1; (-) strand; PAM type: YTN; PAM sequence: CTG
gaggtccaggtgggaagcat

SEQ ID NO: 26252 - DNA, 20 bp, Artificial Sequence
  Description of Artificial Sequence: Synthetic oligonucleotide
  Target: COL7A1; (-) strand; PAM type: YTN; PAM sequence: TTC
acacaaggggtctggaggtc

SEQ ID NO: 26253 - DNA, 20 bp, Artificial Sequence
  Description of Artificial Sequence: Synthetic oligonucleotide
  Target: COL7A1; (-) strand; PAM type: YTN; PAM sequence: CTT
cacacaaggggtctggaggt

SEQ ID NO: 26254 - DNA, 20 bp, Artificial Sequence
  Description of Artificial Sequence: Synthetic oligonucleotide
  Target: COL7A1; (-) strand; PAM type: YTN; PAM sequence: CTG
ccagtgtgccttcacacaag

SEQ ID NO: 26255 - DNA, 20 bp, Artificial Sequence
  Description of Artificial Sequence: Synthetic oligonucleotide
  Target: COL7A1; (-) strand; PAM type: YTN; PAM sequence: CTG
ctgccagtgtgccttcacac

SEQ ID NO: 26256 - DNA, 20 bp, Artificial Sequence
  Description of Artificial Sequence: Synthetic oligonucleotide
  Target: COL7A1; (-) strand; PAM type: YTN; PAM sequence: CTG
gcgctgctgccagtgtgcct

SEQ ID NO: 26257 - DNA, 20 bp, Artificial Sequence
  Description of Artificial Sequence: Synthetic oligonucleotide
  Target: COL7A1; (-) strand; PAM type: YTN; PAM sequence: CTC
agaagggatggagggtcccc

SEQ ID NO: 26258 - DNA, 20 bp, Artificial Sequence
  Description of Artificial Sequence: Synthetic oligonucleotide
  Target: COL7A1; (-) strand; PAM type: YTN; PAM sequence: CTG
ggctcagaagggatggaggg

SEQ ID NO: 26259 - DNA, 20 bp, Artificial Sequence
  Description of Artificial Sequence: Synthetic oligonucleotide
  Target: COL7A1; (-) strand; PAM type: YTN; PAM sequence: CTG
gtgtcctgggctcagaaggg

SEQ ID NO: 26260 - DNA, 20 bp, Artificial Sequence
  Description of Artificial Sequence: Synthetic oligonucleotide
  Target: COL7A1; (-) strand; PAM type: YTN; PAM sequence: CTG
gacccaagggtgaccgtggg

SEQ ID NO: 26261 - DNA, 20 bp, Artificial Sequence
  Description of Artificial Sequence: Synthetic oligonucleotide
  Target: COL7A1; (-) strand; PAM type: YTN; PAM sequence: CTG
gatcatctggacccaagggt

SEQ ID NO: 26262 - DNA, 20 bp, Artificial Sequence
  Description of Artificial Sequence: Synthetic oligonucleotide
  Target: COL7A1; (-) strand; PAM type: YTN; PAM sequence: CTG
cagggcagccctggatcatc

SEQ ID NO: 26263 - DNA, 20 bp, Artificial Sequence
  Description of Artificial Sequence: Synthetic oligonucleotide
  Target: COL7A1; (-) strand; PAM type: YTN; PAM sequence: TTC
tgcagggcagccctggatca

SEQ ID NO: 26264 - DNA, 20 bp, Artificial Sequence
  Description of Artificial Sequence: Synthetic oligonucleotide
  Target: COL7A1; (-) strand; PAM type: YTN; PAM sequence: TTT
ctgcagggcagccctggatc

SEQ ID NO: 26265 - DNA, 20 bp, Artificial Sequence
  Description of Artificial Sequence: Synthetic oligonucleotide
  Target: COL7A1; (-) strand; PAM type: YTN; PAM sequence: CTT
tctgcagggcagccctggat

SEQ ID NO: 26266 - DNA, 20 bp, Artificial Sequence
  Description of Artificial Sequence: Synthetic oligonucleotide
  Target: COL7A1; (-) strand; PAM type: YTN; PAM sequence: CTG
cctttctgcagggcagccct

SEQ ID NO: 26267 - DNA, 20 bp, Artificial Sequence
  Description of Artificial Sequence: Synthetic oligonucleotide
  Target: COL7A1; (-) strand; PAM type: YTN; PAM sequence: CTG
acccctgcctttctgcaggg

SEQ ID NO: 26268 - DNA, 20 bp, Artificial Sequence
  Description of Artificial Sequence: Synthetic oligonucleotide
  Target: COL7A1; (-) strand; PAM type: YTN; PAM sequence: TTG
agtggccctgacccctgcct

SEQ ID NO: 26269 - DNA, 20 bp, Artificial Sequence
  Description of Artificial Sequence: Synthetic oligonucleotide
  Target: COL7A1; (-) strand; PAM type: YTN; PAM sequence: CTT
gagtggccctgacccctgcc

SEQ ID NO: 26270 - DNA, 20 bp, Artificial Sequence
  Description of Artificial Sequence: Synthetic oligonucleotide
  Target: COL7A1; (-) strand; PAM type: YTN; PAM sequence: CTA
ccttgagtggccctgacccc

SEQ ID NO: 26271 - DNA, 20 bp, Artificial Sequence
  Description of Artificial Sequence: Synthetic oligonucleotide
  Target: COL7A1; (-) strand; PAM type: YTN; PAM sequence: CTG
cctaccttgagtggccctga

SEQ ID NO: 26272 - DNA, 20 bp, Artificial Sequence
  Description of Artificial Sequence: Synthetic oligonucleotide
  Target: COL7A1; (-) strand; PAM type: YTN; PAM sequence: CTG
ctgcctaccttgagtggccc

SEQ ID NO: 26273 - DNA, 20 bp, Artificial Sequence
  Description of Artificial Sequence: Synthetic oligonucleotide
  Target: COL7A1; (-) strand; PAM type: YTN; PAM sequence: CTC
ccaaactgctgcctaccttg

SEQ ID NO: 26274 - DNA, 20 bp, Artificial Sequence
  Description of Artificial Sequence: Synthetic oligonucleotide
  Target: COL7A1; (-) strand; PAM type: YTN; PAM sequence: CTC
tcccaaactgctgcctacct

SEQ ID NO: 26275 - DNA, 20 bp, Artificial Sequence
  Description of Artificial Sequence: Synthetic oligonucleotide
  Target: COL7A1; (-) strand; PAM type: YTN; PAM sequence: TTC
caaagctctcccaaactgct

SEQ ID NO: 26276 - DNA, 20 bp, Artificial Sequence
  Description of Artificial Sequence: Synthetic oligonucleotide
  Target: COL7A1; (-) strand; PAM type: YTN; PAM sequence: CTT
ccaaagctctcccaaactgc

SEQ ID NO: 26277 - DNA, 20 bp, Artificial Sequence
  Description of Artificial Sequence: Synthetic oligonucleotide
  Target: COL7A1; (-) strand; PAM type: YTN; PAM sequence: CTC
atggtgcttccaaagctctc

SEQ ID NO: 26278 - DNA, 20 bp, Artificial Sequence
  Description of Artificial Sequence: Synthetic oligonucleotide
  Target: COL7A1; (-) strand; PAM type: YTN; PAM sequence: TTC
ccatgagtcctcatggtgct

SEQ ID NO: 26279 - DNA, 20 bp, Artificial Sequence
  Description of Artificial Sequence: Synthetic oligonucleotide
  Target: COL7A1; (-) strand; PAM type: YTN; PAM sequence: CTA
ccaacattcccatgagtcct

SEQ ID NO: 26280 - DNA, 20 bp, Artificial Sequence
  Description of Artificial Sequence: Synthetic oligonucleotide
  Target: COL7A1; (-) strand; PAM type: YTN; PAM sequence: CTG
aaggctaccaacattcccat

SEQ ID NO: 26281 - DNA, 20 bp, Artificial Sequence
  Description of Artificial Sequence: Synthetic oligonucleotide
  Target: COL7A1; (-) strand; PAM type: YTN; PAM sequence: CTG
cacacacgcatctgaaggct

SEQ ID NO: 26282 - DNA, 20 bp, Artificial Sequence
  Description of Artificial Sequence: Synthetic oligonucleotide
  Target: COL7A1; (-) strand; PAM type: YTN; PAM sequence: TTG
acccctgcacacacgcatct

SEQ ID NO: 26283 - DNA, 20 bp, Artificial Sequence
  Description of Artificial Sequence: Synthetic oligonucleotide
  Target: COL7A1; (-) strand; PAM type: YTN; PAM sequence: TTT
gacccctgcacacacgcatc

SEQ ID NO: 26284 - DNA, 20 bp, Artificial Sequence
  Description of Artificial Sequence: Synthetic oligonucleotide
  Target: COL7A1; (-) strand; PAM type: YTN; PAM sequence: CTT
tgacccctgcacacacgcat

SEQ ID NO: 26285 - DNA, 20 bp, Artificial Sequence
  Description of Artificial Sequence: Synthetic oligonucleotide
  Target: COL7A1; (-) strand; PAM type: YTN; PAM sequence: TTC
ctttgacccctgcacacacg

SEQ ID NO: 26286 - DNA, 20 bp, Artificial Sequence
  Description of Artificial Sequence: Synthetic oligonucleotide
  Target: COL7A1; (-) strand; PAM type: YTN; PAM sequence: CTT
cctttgacccctgcacacac

SEQ ID NO: 26287 - DNA, 20 bp, Artificial Sequence
  Description of Artificial Sequence: Synthetic oligonucleotide
  Target: COL7A1; (-) strand; PAM type: YTN; PAM sequence: TTC
acttcctttgacccctgcac

SEQ ID NO: 26288 - DNA, 20 bp, Artificial Sequence
  Description of Artificial Sequence: Synthetic oligonucleotide
  Target: COL7A1; (-) strand; PAM type: YTN; PAM sequence: CTT
cacttcctttgacccctgca

SEQ ID NO: 26289 - DNA, 20 bp, Artificial Sequence
  Description of Artificial Sequence: Synthetic oligonucleotide
  Target: COL7A1; (-) strand; PAM type: YTN; PAM sequence: CTC
ccaatcttcacttcctttga

SEQ ID NO: 26290 - DNA, 20 bp, Artificial Sequence
  Description of Artificial Sequence: Synthetic oligonucleotide
  Target: COL7A1; (-) strand; PAM type: YTN; PAM sequence: CTA
aaccctcccaatcttcactt

SEQ ID NO: 26291 - DNA, 20 bp, Artificial Sequence
  Description of Artificial Sequence: Synthetic oligonucleotide
  Target: COL7A1; (-) strand; PAM type: YTN; PAM sequence: CTG
taatgctaaaccctcccaat

SEQ ID NO: 26292 - DNA, 20 bp, Artificial Sequence
  Description of Artificial Sequence: Synthetic oligonucleotide
  Target: COL7A1; (-) strand; PAM type: YTN; PAM sequence: CTA
ccccccaaccctgtaatgct

SEQ ID NO: 26293 - DNA, 20 bp, Artificial Sequence
  Description of Artificial Sequence: Synthetic oligonucleotide
  Target: COL7A1; (-) strand; PAM type: YTN; PAM sequence: CTG
atcctaccccccaaccctgt

SEQ ID NO: 26294 - DNA, 20 bp, Artificial Sequence
  Description of Artificial Sequence: Synthetic oligonucleotide
  Target: COL7A1; (-) strand; PAM type: YTN; PAM sequence: TTC
ccaatacctgatcctacccc

SEQ ID NO: 26295 - DNA, 20 bp, Artificial Sequence
  Description of Artificial Sequence: Synthetic oligonucleotide
  Target: COL7A1; (-) strand; PAM type: YTN; PAM sequence: CTC
caaccagccaattcccaata

SEQ ID NO: 26296 - DNA, 20 bp, Artificial Sequence
  Description of Artificial Sequence: Synthetic oligonucleotide
  Target: COL7A1; (-) strand; PAM type: YTN; PAM sequence: TTA
accctccaaccagccaattc

SEQ ID NO: 26297 - DNA, 20 bp, Artificial Sequence
  Description of Artificial Sequence: Synthetic oligonucleotide
  Target: COL7A1; (-) strand; PAM type: YTN; PAM sequence: CTT
aaccctccaaccagccaatt

SEQ ID NO: 26298 - DNA, 20 bp, Artificial Sequence
  Description of Artificial Sequence: Synthetic oligonucleotide
  Target: COL7A1; (-) strand; PAM type: YTN; PAM sequence: CTC
accccaaccttaaccctcca

SEQ ID NO: 26299 - DNA, 20 bp, Artificial Sequence
  Description of Artificial Sequence: Synthetic oligonucleotide
  Target: COL7A1; (-) strand; PAM type: YTN; PAM sequence: CTC
ctcaccccaaccttaaccct

SEQ ID NO: 26300 - DNA, 20 bp, Artificial Sequence
  Description of Artificial Sequence: Synthetic oligonucleotide
  Target: COL7A1; (-) strand; PAM type: YTN; PAM sequence: CTA
tgactcctcaccccaacctt

SEQ ID NO: 26301 - DNA, 20 bp, Artificial Sequence
  Description of Artificial Sequence: Synthetic oligonucleotide
  Target: COL7A1; (-) strand; PAM type: YTN; PAM sequence: CTG
gagaggatggacgaaatgtg

SEQ ID NO: 26302 - DNA, 20 bp, Artificial Sequence
  Description of Artificial Sequence: Synthetic oligonucleotide
  Target: COL7A1; (-) strand; PAM type: YTN; PAM sequence: CTG
tgggtgaaaagggagaccag

SEQ ID NO: 26303 - DNA, 20 bp, Artificial Sequence
  Description of Artificial Sequence: Synthetic oligonucleotide
  Target: COL7A1; (-) strand; PAM type: YTN; PAM sequence: TTC
gggggcctgtgggtgaaaag

SEQ ID NO: 26304 - DNA, 20 bp, Artificial Sequence
  Description of Artificial Sequence: Synthetic oligonucleotide
  Target: COL7A1; (-) strand; PAM type: YTN; PAM sequence: CTG
gagttcgggggcctgtgggt

SEQ ID NO: 26305 - DNA, 20 bp, Artificial Sequence
  Description of Artificial Sequence: Synthetic oligonucleotide
  Target: COL7A1; (-) strand; PAM type: YTN; PAM sequence: TTA
gggggcacctggagttcggg

SEQ ID NO: 26306 - DNA, 20 bp, Artificial Sequence
  Description of Artificial Sequence: Synthetic oligonucleotide
  Target: COL7A1; (-) strand; PAM type: YTN; PAM sequence: CTT
agggggcacctggagttcgg

SEQ ID NO: 26307 - DNA, 20 bp, Artificial Sequence
  Description of Artificial Sequence: Synthetic oligonucleotide
  Target: COL7A1; (-) strand; PAM type: YTN; PAM sequence: TTC
ttagggggcacctggagttc

SEQ ID NO: 26308 - DNA, 20 bp, Artificial Sequence
  Description of Artificial Sequence: Synthetic oligonucleotide
  Target: COL7A1; (-) strand; PAM type: YTN; PAM sequence: CTT
cttagggggcacctggagtt

SEQ ID NO: 26309 - DNA, 20 bp, Artificial Sequence
  Description of Artificial Sequence: Synthetic oligonucleotide
  Target: COL7A1; (-) strand; PAM type: YTN; PAM sequence: CTC
ttcttagggggcacctggag

SEQ ID NO: 26310 - DNA, 20 bp, Artificial Sequence
  Description of Artificial Sequence: Synthetic oligonucleotide
  Target: COL7A1; (-) strand; PAM type: YTN; PAM sequence: CTG
ctcttcttagggggcacctg

SEQ ID NO: 26311 - DNA, 20 bp, Artificial Sequence
  Description of Artificial Sequence: Synthetic oligonucleotide
  Target: COL7A1; (-) strand; PAM type: YTN; PAM sequence: CTC
aggccagctgctcttcttag

SEQ ID NO: 26312 - DNA, 20 bp, Artificial Sequence
  Description of Artificial Sequence: Synthetic oligonucleotide
  Target: COL7A1; (-) strand; PAM type: YTN; PAM sequence: CTG
tctcaggccagctgctcttc

SEQ ID NO: 26313 - DNA, 20 bp, Artificial Sequence
  Description of Artificial Sequence: Synthetic oligonucleotide
  Target: COL7A1; (-) strand; PAM type: YTN; PAM sequence: TTG
ggagggtctgtctcaggcca

SEQ ID NO: 26314 - DNA, 20 bp, Artificial Sequence
  Description of Artificial Sequence: Synthetic oligonucleotide
  Target: COL7A1; (-) strand; PAM type: YTN; PAM sequence: CTG
caaaatattgggagggtctg

SEQ ID NO: 26315 - DNA, 20 bp, Artificial Sequence
  Description of Artificial Sequence: Synthetic oligonucleotide
  Target: COL7A1; (-) strand; PAM type: YTN; PAM sequence: CTG
gggcagtgtagcgggtcata

SEQ ID NO: 26316 - DNA, 20 bp, Artificial Sequence
  Description of Artificial Sequence: Synthetic oligonucleotide
  Target: COL7A1; (-) strand; PAM type: YTN; PAM sequence: TTG
gagtaatggggaacctgggg

SEQ ID NO: 26317 - DNA, 20 bp, Artificial Sequence
  Description of Artificial Sequence: Synthetic oligonucleotide
  Target: COL7A1; (-) strand; PAM type: YTN; PAM sequence: TTT
ggagtaatggggaacctggg

SEQ ID NO: 26318 - DNA, 20 bp, Artificial Sequence
  Description of Artificial Sequence: Synthetic oligonucleotide
  Target: COL7A1; (-) strand; PAM type: YTN; PAM sequence: TTT
tggagtaatggggaacctgg

SEQ ID NO: 26319 - DNA, 20 bp, Artificial Sequence
  Description of Artificial Sequence: Synthetic oligonucleotide
  Target: COL7A1; (-) strand; PAM type: YTN; PAM sequence: CTG
atgtggattttggagtaatg

SEQ ID NO: 26320 - DNA, 20 bp, Artificial Sequence
  Description of Artificial Sequence: Synthetic oligonucleotide
  Target: COL7A1; (-) strand; PAM type: YTN; PAM sequence: CTC
tgatgtggattttggagtaa

SEQ ID NO: 26321 - DNA, 20 bp, Artificial Sequence
  Description of Artificial Sequence: Synthetic oligonucleotide
  Target: COL7A1; (-) strand; PAM type: YTN; PAM sequence: CTG
cagggaggcatggggtgatg

SEQ ID NO: 26322 - DNA, 20 bp, Artificial Sequence
  Description of Artificial Sequence: Synthetic oligonucleotide
  Target: COL7A1; (-) strand; PAM type: YTN; PAM sequence: CTG
aggggggtaaggggtgatgg

SEQ ID NO: 26323 - DNA, 20 bp, Artificial Sequence
  Description of Artificial Sequence: Synthetic oligonucleotide
  Target: COL7A1; (-) strand; PAM type: YTN; PAM sequence: TTG
gcagagagaagtaacagggg

SEQ ID NO: 26324 - DNA, 20 bp, Artificial Sequence
  Description of Artificial Sequence: Synthetic oligonucleotide
  Target: COL7A1; (-) strand; PAM type: YTN; PAM sequence: CTT
ggcagagagaagtaacaggg

SEQ ID NO: 26325 - DNA, 20 bp, Artificial Sequence
  Description of Artificial Sequence: Synthetic oligonucleotide
  Target: COL7A1; (-) strand; PAM type: YTN; PAM sequence: TTC
gggtgagtcttggcagagag

SEQ ID NO: 26326 - DNA, 20 bp, Artificial Sequence
  Description of Artificial Sequence: Synthetic oligonucleotide
  Target: COL7A1; (-) strand; PAM type: YTN; PAM sequence: CTT
cgggtgagtcttggcagaga

SEQ ID NO: 26327 - DNA, 20 bp, Artificial Sequence
  Description of Artificial Sequence: Synthetic oligonucleotide
  Target: COL7A1; (-) strand; PAM type: YTN; PAM sequence: CTG
gaaaagcaggcgagcgtggc

SEQ ID NO: 26328 - DNA, 20 bp, Artificial Sequence
  Description of Artificial Sequence: Synthetic oligonucleotide
  Target: COL7A1; (-) strand; PAM type: YTN; PAM sequence: TTG
cctggaaaagcaggcgagcg

SEQ ID NO: 26329 - DNA, 20 bp, Artificial Sequence
  Description of Artificial Sequence: Synthetic oligonucleotide
  Target: COL7A1; (-) strand; PAM type: YTN; PAM sequence: TTT
gcctggaaaagcaggcgagc

SEQ ID NO: 26330 - DNA, 20 bp, Artificial Sequence
  Description of Artificial Sequence: Synthetic oligonucleotide
  Target: COL7A1; (-) strand; PAM type: YTN; PAM sequence: CTA
tcaccagggtgacccgggtt

SEQ ID NO: 26331 - DNA, 20 bp, Artificial Sequence
  Description of Artificial Sequence: Synthetic oligonucleotide
  Target: COL7A1; (-) strand; PAM type: YTN; PAM sequence: CTC
tatcaccagggtgacccggg

SEQ ID NO: 26332 - DNA, 20 bp, Artificial Sequence
  Description of Artificial Sequence: Synthetic oligonucleotide
  Target: COL7A1; (-) strand; PAM type: YTN; PAM sequence: CTC
tctatcaccagggtgacccg

SEQ ID NO: 26333 - DNA, 20 bp, Artificial Sequence
  Description of Artificial Sequence: Synthetic oligonucleotide
  Target: COL7A1; (-) strand; PAM type: YTN; PAM sequence: TTC
tctctatcaccagggtgacc

SEQ ID NO: 26334 - DNA, 20 bp, Artificial Sequence
  Description of Artificial Sequence: Synthetic oligonucleotide
  Target: COL7A1; (-) strand; PAM type: YTN; PAM sequence: TTT
ctctctatcaccagggtgac

SEQ ID NO: 26335 - DNA, 20 bp, Artificial Sequence
  Description of Artificial Sequence: Synthetic oligonucleotide
  Target: COL7A1; (-) strand; PAM type: YTN; PAM sequence: TTT
tctctctatcaccagggtga

SEQ ID NO: 26336 - DNA, 20 bp, Artificial Sequence
  Description of Artificial Sequence: Synthetic oligonucleotide
  Target: COL7A1; (-) strand; PAM type: YTN; PAM sequence: CTT
ttctctctatcaccagggtg

SEQ ID NO: 26337 - DNA, 20 bp, Artificial Sequence
  Description of Artificial Sequence: Synthetic oligonucleotide
  Target: COL7A1; (-) strand; PAM type: YTN; PAM sequence: CTG
tgcagtatgacttttctctc

SEQ ID NO: 26338 - DNA, 20 bp, Artificial Sequence
  Description of Artificial Sequence: Synthetic oligonucleotide
  Target: COL7A1; (-) strand; PAM type: YTN; PAM sequence: CTG
ccctgtgcagtatgactttt

SEQ ID NO: 26339 - DNA, 20 bp, Artificial Sequence
  Description of Artificial Sequence: Synthetic oligonucleotide
  Target: COL7A1; (-) strand; PAM type: YTN; PAM sequence: CTG
actgccctgtgcagtatgac

SEQ ID NO: 26340 - DNA, 20 bp, Artificial Sequence
  Description of Artificial Sequence: Synthetic oligonucleotide
  Target: COL7A1; (-) strand; PAM type: YTN; PAM sequence: TTA
gatcctgactgccctgtgca

SEQ ID NO: 26341 - DNA, 20 bp, Artificial Sequence
  Description of Artificial Sequence: Synthetic oligonucleotide
  Target: COL7A1; (-) strand; PAM type: YTN; PAM sequence: CTG
agtgagttagatcctgactg

SEQ ID NO: 26342 - DNA, 20 bp, Artificial Sequence
  Description of Artificial Sequence: Synthetic oligonucleotide
  Target: COL7A1; (-) strand; PAM type: YTN; PAM sequence: CTC
cctgagtgagttagatcctg

SEQ ID NO: 26343 - DNA, 20 bp, Artificial Sequence
  Description of Artificial Sequence: Synthetic oligonucleotide
  Target: COL7A1; (-) strand; PAM type: YTN; PAM sequence: CTC
tccctgagtgagttagatcc

SEQ ID NO: 26344 - DNA, 20 bp, Artificial Sequence
  Description of Artificial Sequence: Synthetic oligonucleotide
  Target: COL7A1; (-) strand; PAM type: YTN; PAM sequence: CTG
tcccctctccctgagtgagt

SEQ ID NO: 26345 - DNA, 20 bp, Artificial Sequence
  Description of Artificial Sequence: Synthetic oligonucleotide
  Target: COL7A1; (-) strand; PAM type: YTN; PAM sequence: CTC
tgtcccctctccctgagtga

SEQ ID NO: 26346 - DNA, 20 bp, Artificial Sequence
  Description of Artificial Sequence: Synthetic oligonucleotide
  Target: COL7A1; (-) strand; PAM type: YTN; PAM sequence: TTC
tctgtcccctctccctgagt

SEQ ID NO: 26347 - DNA, 20 bp, Artificial Sequence
  Description of Artificial Sequence: Synthetic oligonucleotide
  Target: COL7A1; (-) strand; PAM type: YTN; PAM sequence: CTT
ctctgtcccctctccctgag

SEQ ID NO: 26348 - DNA, 20 bp, Artificial Sequence
  Description of Artificial Sequence: Synthetic oligonucleotide
  Target: COL7A1; (-) strand; PAM type: YTN; PAM sequence: CTC
agacccttctctgtcccctc

SEQ ID NO: 26349 - DNA, 20 bp, Artificial Sequence
  Description of Artificial Sequence: Synthetic oligonucleotide
  Target: COL7A1; (-) strand; PAM type: YTN; PAM sequence: CTG
ctcagacccttctctgtccc

SEQ ID NO: 26350 - DNA, 20 bp, Artificial Sequence
  Description of Artificial Sequence: Synthetic oligonucleotide
  Target: COL7A1; (-) strand; PAM type: YTN; PAM sequence: CTG
ctgctcagacccttctctgt

SEQ ID NO: 26351 - DNA, 20 bp, Artificial Sequence
  Description of Artificial Sequence: Synthetic oligonucleotide
  Target: COL7A1; (-) strand; PAM type: YTN; PAM sequence: CTG
tccagctgctgctcagaccc

SEQ ID NO: 26352 - DNA, 20 bp, Artificial Sequence
  Description of Artificial Sequence: Synthetic oligonucleotide
  Target: COL7A1; (-) strand; PAM type: YTN; PAM sequence: CTC
ctgtccagctgctgctcaga

SEQ ID NO: 26353 - DNA, 20 bp, Artificial Sequence
  Description of Artificial Sequence: Synthetic oligonucleotide
  Target: COL7A1; (-) strand; PAM type: YTN; PAM sequence: CTG
cctcctgtccagctgctgct

SEQ ID NO: 26354 - DNA, 20 bp, Artificial Sequence
  Description of Artificial Sequence: Synthetic oligonucleotide
  Target: COL7A1; (-) strand; PAM type: YTN; PAM sequence: CTC
cctgcctcctgtccagctgc

SEQ ID NO: 26355 - DNA, 20 bp, Artificial Sequence
  Description of Artificial Sequence: Synthetic oligonucleotide
  Target: COL7A1; (-) strand; PAM type: YTN; PAM sequence: TTC
atccatccactccctgcctc

SEQ ID NO: 26356 - DNA, 20 bp, Artificial Sequence
  Description of Artificial Sequence: Synthetic oligonucleotide
  Target: COL7A1; (-) strand; PAM type: YTN; PAM sequence: CTC
caccagttcatccatccact

SEQ ID NO: 26357 - DNA, 20 bp, Artificial Sequence
  Description of Artificial Sequence: Synthetic oligonucleotide
  Target: COL7A1; (-) strand; PAM type: YTN; PAM sequence: CTG
gtgctccaccagttcatcca

SEQ ID NO: 26358 - DNA, 20 bp, Artificial Sequence
  Description of Artificial Sequence: Synthetic oligonucleotide
  Target: COL7A1; (-) strand; PAM type: YTN; PAM sequence: CTA
ggatcccagtaggctggtgc

SEQ ID NO: 26359 - DNA, 20 bp, Artificial Sequence
  Description of Artificial Sequence: Synthetic oligonucleotide
  Target: COL7A1; (-) strand; PAM type: YTN; PAM sequence: TTG
aactaggatcccagtaggct

SEQ ID NO: 26360 - DNA, 20 bp, Artificial Sequence
  Description of Artificial Sequence: Synthetic oligonucleotide
  Target: COL7A1; (-) strand; PAM type: YTN; PAM sequence: CTT
gaactaggatcccagtaggc

SEQ ID NO: 26361 - DNA, 20 bp, Artificial Sequence
  Description of Artificial Sequence: Synthetic oligonucleotide
  Target: COL7A1; (-) strand; PAM type: YTN; PAM sequence: TTA
cccttgaactaggatcccag

SEQ ID NO: 26362 - DNA, 20 bp, Artificial Sequence
  Description of Artificial Sequence: Synthetic oligonucleotide
  Target: COL7A1; (-) strand; PAM type: YTN; PAM sequence: TTT
acccttgaactaggatccca

SEQ ID NO: 26363 - DNA, 20 bp, Artificial Sequence
  Description of Artificial Sequence: Synthetic oligonucleotide
  Target: COL7A1; (-) strand; PAM type: YTN; PAM sequence: CTT
tacccttgaactaggatccc

SEQ ID NO: 26364 - DNA, 20 bp, Artificial Sequence
  Description of Artificial Sequence: Synthetic oligonucleotide
  Target: COL7A1; (-) strand; PAM type: YTN; PAM sequence: CTG
atcctttacccttgaactag

SEQ ID NO: 26365 - DNA, 20 bp, Artificial Sequence
  Description of Artificial Sequence: Synthetic oligonucleotide
  Target: COL7A1; (-) strand; PAM type: YTN; PAM sequence: TTC
tgatcctttacccttgaact

SEQ ID NO: 26366 - DNA, 20 bp, Artificial Sequence
  Description of Artificial Sequence: Synthetic oligonucleotide
  Target: COL7A1; (-) strand; PAM type: YTN; PAM sequence: TTT
ctgatcctttacccttgaac

SEQ ID NO: 26367 - DNA, 20 bp, Artificial Sequence
  Description of Artificial Sequence: Synthetic oligonucleotide
  Target: COL7A1; (-) strand; PAM type: YTN; PAM sequence: CTG
tggtttctgatcctttaccc

SEQ ID NO: 26368 - DNA, 20 bp, Artificial Sequence
  Description of Artificial Sequence: Synthetic oligonucleotide
  Target: COL7A1; (-) strand; PAM type: YTN; PAM sequence: TTC
ccactgtggtttctgatcct

SEQ ID NO: 26369 - DNA, 20 bp, Artificial Sequence
  Description of Artificial Sequence: Synthetic oligonucleotide
  Target: COL7A1; (-) strand; PAM type: YTN; PAM sequence: CTT
cccactgtggtttctgatcc

SEQ ID NO: 26370 - DNA, 20 bp, Artificial Sequence
  Description of Artificial Sequence: Synthetic oligonucleotide
  Target: COL7A1; (-) strand; PAM type: YTN; PAM sequence: CTC
cttcccactgtggtttctga

SEQ ID NO: 26371 - DNA, 20 bp, Artificial Sequence
  Description of Artificial Sequence: Synthetic oligonucleotide
  Target: COL7A1; (-) strand; PAM type: YTN; PAM sequence: CTC
cggtgagactccttcccact

SEQ ID NO: 26372 - DNA, 20 bp, Artificial Sequence
  Description of Artificial Sequence: Synthetic oligonucleotide
  Target: COL7A1; (-) strand; PAM type: YTN; PAM sequence: TTG
gagagaaaggtgacgagggt

SEQ ID NO: 26373 - DNA, 20 bp, Artificial Sequence
  Description of Artificial Sequence: Synthetic oligonucleotide
  Target: COL7A1; (-) strand; PAM type: YTN; PAM sequence: TTC
acagggtgaagttggagaga

SEQ ID NO: 26374 - DNA, 20 bp, Artificial Sequence
  Description of Artificial Sequence: Synthetic oligonucleotide
  Target: COL7A1; (-) strand; PAM type: YTN; PAM sequence: TTT
cacagggtgaagttggagag

SEQ ID NO: 26375 - DNA, 20 bp, Artificial Sequence
  Description of Artificial Sequence: Synthetic oligonucleotide
  Target: COL7A1; (-) strand; PAM type: YTN; PAM sequence: CTC
atgtttcacagggtgaagtt

SEQ ID NO: 26376 - DNA, 20 bp, Artificial Sequence
  Description of Artificial Sequence: Synthetic oligonucleotide
  Target: COL7A1; (-) strand; PAM type: YTN; PAM sequence: CTC
tcatgtttcacagggtgaag

SEQ ID NO: 26377 - DNA, 20 bp, Artificial Sequence
  Description of Artificial Sequence: Synthetic oligonucleotide
  Target: COL7A1; (-) strand; PAM type: YTN; PAM sequence: CTG
actctcatgtttcacagggt

SEQ ID NO: 26378 - DNA, 20 bp, Artificial Sequence
  Description of Artificial Sequence: Synthetic oligonucleotide
  Target: COL7A1; (-) strand; PAM type: YTN; PAM sequence: TTG
gaaccagggctgactctcat

SEQ ID NO: 26379 - DNA, 20 bp, Artificial Sequence
  Description of Artificial Sequence: Synthetic oligonucleotide
  Target: COL7A1; (-) strand; PAM type: YTN; PAM sequence: CTT
ggaaccagggctgactctca

SEQ ID NO: 26380 - DNA, 20 bp, Artificial Sequence
  Description of Artificial Sequence: Synthetic oligonucleotide
  Target: COL7A1; (-) strand; PAM type: YTN; PAM sequence: TTC
ttggaaccagggctgactct

SEQ ID NO: 26381 - DNA, 20 bp, Artificial Sequence
  Description of Artificial Sequence: Synthetic oligonucleotide
  Target: COL7A1; (-) strand; PAM type: YTN; PAM sequence: TTG
ccagcatcatgggggttctt

SEQ ID NO: 26382 - DNA, 20 bp, Artificial Sequence
  Description of Artificial Sequence: Synthetic oligonucleotide
  Target: COL7A1; (-) strand; PAM type: YTN; PAM sequence: CTG
ttgccagcatcatgggggtt

SEQ ID NO: 26383 - DNA, 20 bp, Artificial Sequence
  Description of Artificial Sequence: Synthetic oligonucleotide
  Target: COL7A1; (-) strand; PAM type: YTN; PAM sequence: CTG
gagtcgggggagtcatggcg

SEQ ID NO: 26384 - DNA, 20 bp, Artificial Sequence
  Description of Artificial Sequence: Synthetic oligonucleotide
  Target: COL7A1; (-) strand; PAM type: YTN; PAM sequence: TTG
gcccccgaggacgagatgta

SEQ ID NO: 26385 - DNA, 20 bp, Artificial Sequence
  Description of Artificial Sequence: Synthetic oligonucleotide
  Target: COL7A1; (-) strand; PAM type: YTN; PAM sequence: CTG
ttggcccccgaggacgagat

SEQ ID NO: 26386 - DNA, 20 bp, Artificial Sequence
  Description of Artificial Sequence: Synthetic oligonucleotide
  Target: COL7A1; (-) strand; PAM type: YTN; PAM sequence: CTG
gccccccaggacctgttggc

SEQ ID NO: 26387 - DNA, 20 bp, Artificial Sequence
  Description of Artificial Sequence: Synthetic oligonucleotide
  Target: COL7A1; (-) strand; PAM type: YTN; PAM sequence: CTG
ggcggcctggccccccagga

SEQ ID NO: 26388 - DNA, 20 bp, Artificial Sequence
  Description of Artificial Sequence: Synthetic oligonucleotide
  Target: COL7A1; (-) strand; PAM type: YTN; PAM sequence: CTG
gagagaagggagaccctggg

SEQ ID NO: 26389 - DNA, 20 bp, Artificial Sequence
  Description of Artificial Sequence: Synthetic oligonucleotide
  Target: COL7A1; (-) strand; PAM type: YTN; PAM sequence: CTC
ctggagagaagggagaccct

SEQ ID NO: 26390 - DNA, 20 bp, Artificial Sequence
  Description of Artificial Sequence: Synthetic oligonucleotide
  Target: COL7A1; (-) strand; PAM type: YTN; PAM sequence: CTC
agggcctcctggagagaagg

SEQ ID NO: 26391 - DNA, 20 bp, Artificial Sequence
  Description of Artificial Sequence: Synthetic oligonucleotide
  Target: COL7A1; (-) strand; PAM type: YTN; PAM sequence: CTC
cacagggtgactcagggcct

SEQ ID NO: 26392 - DNA, 20 bp, Artificial Sequence
  Description of Artificial Sequence: Synthetic oligonucleotide
  Target: COL7A1; (-) strand; PAM type: YTN; PAM sequence: CTC
ctccacagggtgactcaggg

SEQ ID NO: 26393 - DNA, 20 bp, Artificial Sequence
  Description of Artificial Sequence: Synthetic oligonucleotide
  Target: COL7A1; (-) strand; PAM type: YTN; PAM sequence: TTG
cctcctccacagggtgactc

SEQ ID NO: 26394 - DNA, 20 bp, Artificial Sequence
  Description of Artificial Sequence: Synthetic oligonucleotide
  Target: COL7A1; (-) strand; PAM type: YTN; PAM sequence: CTT
gcctcctccacagggtgact

SEQ ID NO: 26395 - DNA, 20 bp, Artificial Sequence
  Description of Artificial Sequence: Synthetic oligonucleotide
  Target: COL7A1; (-) strand; PAM type: YTN; PAM sequence: CTC
ttgcctcctccacagggtga

SEQ ID NO: 26396 - DNA, 20 bp, Artificial Sequence
  Description of Artificial Sequence: Synthetic oligonucleotide
  Target: COL7A1; (-) strand; PAM type: YTN; PAM sequence: CTC
cctcttgcctcctccacagg

SEQ ID NO: 26397 - DNA, 20 bp, Artificial Sequence
  Description of Artificial Sequence: Synthetic oligonucleotide
  Target: COL7A1; (-) strand; PAM type: YTN; PAM sequence: CTG
catcacctccctcttgcctc

SEQ ID NO: 26398 - DNA, 20 bp, Artificial Sequence
  Description of Artificial Sequence: Synthetic oligonucleotide
  Target: COL7A1; (-) strand; PAM type: YTN; PAM sequence: TTC
gagcgtcctgcatcacctcc

SEQ ID NO: 26399 - DNA, 20 bp, Artificial Sequence
  Description of Artificial Sequence: Synthetic oligonucleotide
  Target: COL7A1; (-) strand; PAM type: YTN; PAM sequence: CTT
cgagcgtcctgcatcacctc

SEQ ID NO: 26400 - DNA, 20 bp, Artificial Sequence
  Description of Artificial Sequence: Synthetic oligonucleotide
  Target: COL7A1; (-) strand; PAM type: YTN; PAM sequence: TTG
cttcgagcgtcctgcatcac

SEQ ID NO: 26401 - DNA, 20 bp, Artificial Sequence
  Description of Artificial Sequence: Synthetic oligonucleotide
  Target: COL7A1; (-) strand; PAM type: YTN; PAM sequence: CTT
gcttcgagcgtcctgcatca

SEQ ID NO: 26402 - DNA, 20 bp, Artificial Sequence
  Description of Artificial Sequence: Synthetic oligonucleotide
  Target: COL7A1; (-) strand; PAM type: YTN; PAM sequence: CTG
cttgcttcgagcgtcctgca

SEQ ID NO: 26403 - DNA, 20 bp, Artificial Sequence
  Description of Artificial Sequence: Synthetic oligonucleotide
  Target: COL7A1; (-) strand; PAM type: YTN; PAM sequence: TTG
agaactgcttgcttcgagcg

SEQ ID NO: 26404 - DNA, 20 bp, Artificial Sequence
  Description of Artificial Sequence: Synthetic oligonucleotide
  Target: COL7A1; (-) strand; PAM type: YTN; PAM sequence: CTT
gagaactgcttgcttcgagc

SEQ ID NO: 26405 - DNA, 20 bp, Artificial Sequence
  Description of Artificial Sequence: Synthetic oligonucleotide
  Target: COL7A1; (-) strand; PAM type: YTN; PAM sequence: CTC
cccttgagaactgcttgctt

SEQ ID NO: 26406 - DNA, 20 bp, Artificial Sequence
  Description of Artificial Sequence: Synthetic oligonucleotide
  Target: COL7A1; (-) strand; PAM type: YTN; PAM sequence: CTG
gggtcccctccccttgagaa

SEQ ID NO: 26407 - DNA, 20 bp, Artificial Sequence
  Description of Artificial Sequence: Synthetic oligonucleotide
  Target: COL7A1; (-) strand; PAM type: YTN; PAM sequence: TTC
tggggtcccctccccttgag

SEQ ID NO: 26408 - DNA, 20 bp, Artificial Sequence
  Description of Artificial Sequence: Synthetic oligonucleotide
  Target: COL7A1; (-) strand; PAM type: YTN; PAM sequence: CTT
ctggggtcccctccccttga

SEQ ID NO: 26409 - DNA, 20 bp, Artificial Sequence
  Description of Artificial Sequence: Synthetic oligonucleotide
  Target: COL7A1; (-) strand; PAM type: YTN; PAM sequence: CTC
aaggcttctggggtcccctc

SEQ ID NO: 26410 - DNA, 20 bp, Artificial Sequence
  Description of Artificial Sequence: Synthetic oligonucleotide
  Target: COL7A1; (-) strand; PAM type: YTN; PAM sequence: CTG
ggcaacctcaaggcttctgg

SEQ ID NO: 26411 - DNA, 20 bp, Artificial Sequence
  Description of Artificial Sequence: Synthetic oligonucleotide
  Target: COL7A1; (-) strand; PAM type: YTN; PAM sequence: TTA
ccctgggcaacctcaaggct

SEQ ID NO: 26412 - DNA, 20 bp, Artificial Sequence
  Description of Artificial Sequence: Synthetic oligonucleotide
  Target: COL7A1; (-) strand; PAM type: YTN; PAM sequence: CTG
gcagagcaggacccccagtg

SEQ ID NO: 26413 - DNA, 20 bp, Artificial Sequence
  Description of Artificial Sequence: Synthetic oligonucleotide
  Target: COL7A1; (-) strand; PAM type: YTN; PAM sequence: TTA
ctggcagagcaggaccccca

SEQ ID NO: 26414 - DNA, 20 bp, Artificial Sequence
  Description of Artificial Sequence: Synthetic oligonucleotide
  Target: COL7A1; (-) strand; PAM type: YTN; PAM sequence: CTT
actggcagagcaggaccccc

SEQ ID NO: 26415 - DNA, 20 bp, Artificial Sequence
  Description of Artificial Sequence: Synthetic oligonucleotide
  Target: COL7A1; (-) strand; PAM type: YTN; PAM sequence: TTG
gccttactggcagagcagga

SEQ ID NO: 26416 - DNA, 20 bp, Artificial Sequence
  Description of Artificial Sequence: Synthetic oligonucleotide
  Target: COL7A1; (-) strand; PAM type: YTN; PAM sequence: TTC
agggtcccattggccttact

SEQ ID NO: 26417 - DNA, 20 bp, Artificial Sequence
  Description of Artificial Sequence: Synthetic oligonucleotide
  Target: COL7A1; (-) strand; PAM type: YTN; PAM sequence: CTT
cagggtcccattggccttac

SEQ ID NO: 26418 - DNA, 20 bp, Artificial Sequence
  Description of Artificial Sequence: Synthetic oligonucleotide
  Target: COL7A1; (-) strand; PAM type: YTN; PAM sequence: CTG
tccccttcagggtcccattg

SEQ ID NO: 26419 - DNA, 20 bp, Artificial Sequence
  Description of Artificial Sequence: Synthetic oligonucleotide
  Target: COL7A1; (-) strand; PAM type: YTN; PAM sequence: TTC
tgtccccttcagggtcccat

SEQ ID NO: 26420 - DNA, 20 bp, Artificial Sequence
  Description of Artificial Sequence: Synthetic oligonucleotide
  Target: COL7A1; (-) strand; PAM type: YTN; PAM sequence: CTT
ctgtccccttcagggtccca

SEQ ID NO: 26421 - DNA, 20 bp, Artificial Sequence
  Description of Artificial Sequence: Synthetic oligonucleotide
  Target: COL7A1; (-) strand; PAM type: YTN; PAM sequence: CTG
ccccccttctgtccccttca

SEQ ID NO: 26422 - DNA, 20 bp, Artificial Sequence
  Description of Artificial Sequence: Synthetic oligonucleotide
  Target: COL7A1; (-) strand; PAM type: YTN; PAM sequence: CTA
agtcctgccccccttctgtc

SEQ ID NO: 26423 - DNA, 20 bp, Artificial Sequence
  Description of Artificial Sequence: Synthetic oligonucleotide
  Target: COL7A1; (-) strand; PAM type: YTN; PAM sequence: CTG
actaagtcctgccccccttc

SEQ ID NO: 26424 - DNA, 20 bp, Artificial Sequence
  Description of Artificial Sequence: Synthetic oligonucleotide
  Target: COL7A1; (-) strand; PAM type: YTN; PAM sequence: CTG
gagaccgggtgaatcaatgt

SEQ ID NO: 26425 - DNA, 20 bp, Artificial Sequence
  Description of Artificial Sequence: Synthetic oligonucleotide
  Target: COL7A1; (-) strand; PAM type: YTN; PAM sequence: CTG
gccccaagggagaccctgga

SEQ ID NO: 26426 - DNA, 20 bp, Artificial Sequence
  Description of Artificial Sequence: Synthetic oligonucleotide
  Target: COL7A1; (-) strand; PAM type: YTN; PAM sequence: CTG
gagaccctggccccaaggga

SEQ ID NO: 26427 - DNA, 20 bp, Artificial Sequence
  Description of Artificial Sequence: Synthetic oligonucleotide
  Target: COL7A1; (-) strand; PAM type: YTN; PAM sequence: TTC
ctggagaccctggccccaag

SEQ ID NO: 26428 - DNA, 20 bp, Artificial Sequence
  Description of Artificial Sequence: Synthetic oligonucleotide
  Target: COL7A1; (-) strand; PAM type: YTN; PAM sequence: CTT
cctggagaccctggccccaa

SEQ ID NO: 26429 - DNA, 20 bp, Artificial Sequence
  Description of Artificial Sequence: Synthetic oligonucleotide
  Target: COL7A1; (-) strand; PAM type: YTN; PAM sequence: TTC
ttcctggagaccctggcccc

SEQ ID NO: 26430 - DNA, 20 bp, Artificial Sequence
  Description of Artificial Sequence: Synthetic oligonucleotide
  Target: COL7A1; (-) strand; PAM type: YTN; PAM sequence: TTG
gttcttcctggagaccctgg

SEQ ID NO: 26431 - DNA, 20 bp, Artificial Sequence
  Description of Artificial Sequence: Synthetic oligonucleotide
  Target: COL7A1; (-) strand; PAM type: YTN; PAM sequence: CTT
ggttcttcctggagaccctg

SEQ ID NO: 26432 - DNA, 20 bp, Artificial Sequence
  Description of Artificial Sequence: Synthetic oligonucleotide
  Target: COL7A1; (-) strand; PAM type: YTN; PAM sequence: TTC
catccacagggcccacccgg

SEQ ID NO: 26433 - DNA, 20 bp, Artificial Sequence
  Description of Artificial Sequence: Synthetic oligonucleotide
  Target: COL7A1; (-) strand; PAM type: YTN; PAM sequence: CTT
ccatccacagggcccacccg

SEQ ID NO: 26434 - DNA, 20 bp, Artificial Sequence
  Description of Artificial Sequence: Synthetic oligonucleotide
  Target: COL7A1; (-) strand; PAM type: YTN; PAM sequence: TTA
tccttccatccacagggccc

SEQ ID NO: 26435 - DNA, 20 bp, Artificial Sequence
  Description of Artificial Sequence: Synthetic oligonucleotide
  Target: COL7A1; (-) strand; PAM type: YTN; PAM sequence: CTT
atccttccatccacagggcc

SEQ ID NO: 26436 - DNA, 20 bp, Artificial Sequence
  Description of Artificial Sequence: Synthetic oligonucleotide
  Target: COL7A1; (-) strand; PAM type: YTN; PAM sequence: TTC
ttatccttccatccacaggg

SEQ ID NO: 26437 - DNA, 20 bp, Artificial Sequence
  Description of Artificial Sequence: Synthetic oligonucleotide
  Target: COL7A1; (-) strand; PAM type: YTN; PAM sequence: CTT
cttatccttccatccacagg

SEQ ID NO: 26438 - DNA, 20 bp, Artificial Sequence
  Description of Artificial Sequence: Synthetic oligonucleotide
  Target: COL7A1; (-) strand; PAM type: YTN; PAM sequence: CTG
acttcttatccttccatcca

SEQ ID NO: 26439 - DNA, 20 bp, Artificial Sequence
  Description of Artificial Sequence: Synthetic oligonucleotide
  Target: COL7A1; (-) strand; PAM type: YTN; PAM sequence: TTC
ctgacttcttatccttccat

SEQ ID NO: 26440 - DNA, 20 bp, Artificial Sequence
  Description of Artificial Sequence: Synthetic oligonucleotide
  Target: COL7A1; (-) strand; PAM type: YTN; PAM sequence: CTT
cctgacttcttatccttcca

SEQ ID NO: 26441 - DNA, 20 bp, Artificial Sequence
  Description of Artificial Sequence: Synthetic oligonucleotide
  Target: COL7A1; (-) strand; PAM type: YTN; PAM sequence: TTG
tcttcctgacttcttatcct

SEQ ID NO: 26442 - DNA, 20 bp, Artificial Sequence
  Description of Artificial Sequence: Synthetic oligonucleotide
  Target: COL7A1; (-) strand; PAM type: YTN; PAM sequence: TTG
gtgaaggttgtcttcctgac

SEQ ID NO: 26443 - DNA, 20 bp, Artificial Sequence
  Description of Artificial Sequence: Synthetic oligonucleotide
  Target: COL7A1; (-) strand; PAM type: YTN; PAM sequence: TTA
gggggcagttggtgaaggtt

SEQ ID NO: 26444 - DNA, 20 bp, Artificial Sequence
  Description of Artificial Sequence: Synthetic oligonucleotide
  Target: COL7A1; (-) strand; PAM type: YTN; PAM sequence: TTT
agggggcagttggtgaaggt

SEQ ID NO: 26445 - DNA, 20 bp, Artificial Sequence
  Description of Artificial Sequence: Synthetic oligonucleotide
  Target: COL7A1; (-) strand; PAM type: YTN; PAM sequence: CTA
ccggagtccaaggggaacgg

SEQ ID NO: 26446 - DNA, 20 bp, Artificial Sequence
  Description of Artificial Sequence: Synthetic oligonucleotide
  Target: COL7A1; (-) strand; PAM type: YTN; PAM sequence: CTG
ggcccagaggagctaccgga

SEQ ID NO: 26447 - DNA, 20 bp, Artificial Sequence
  Description of Artificial Sequence: Synthetic oligonucleotide
  Target: COL7A1; (-) strand; PAM type: YTN; PAM sequence: CTC
cagggagatgtggggcccgc

SEQ ID NO: 26448 - DNA, 20 bp, Artificial Sequence
  Description of Artificial Sequence: Synthetic oligonucleotide
  Target: COL7A1; (-) strand; PAM type: YTN; PAM sequence: TTG
tcacctccagggagatgtgg

SEQ ID NO: 26449 - DNA, 20 bp, Artificial Sequence
  Description of Artificial Sequence: Synthetic oligonucleotide
  Target: COL7A1; (-) strand; PAM type: YTN; PAM sequence: TTT
gtcacctccagggagatgtg

SEQ ID NO: 26450 - DNA, 20 bp, Artificial Sequence
  Description of Artificial Sequence: Synthetic oligonucleotide
  Target: COL7A1; (-) strand; PAM type: YTN; PAM sequence: CTT
tgtcacctccagggagatgt

SEQ ID NO: 26451 - DNA, 20 bp, Artificial Sequence
  Description of Artificial Sequence: Synthetic oligonucleotide
  Target: COL7A1; (-) strand; PAM type: YTN; PAM sequence: CTG
atggtctttgtcacctccag

SEQ ID NO: 26452 - DNA, 20 bp, Artificial Sequence
  Description of Artificial Sequence: Synthetic oligonucleotide
  Target: COL7A1; (-) strand; PAM type: YTN; PAM sequence: CTA
gcactgatggtctttgtcac

SEQ ID NO: 26453 - DNA, 20 bp, Artificial Sequence
  Description of Artificial Sequence: Synthetic oligonucleotide
  Target: COL7A1; (-) strand; PAM type: YTN; PAM sequence: CTG
ggactagcactgatggtctt

SEQ ID NO: 26454 - DNA, 20 bp, Artificial Sequence
  Description of Artificial Sequence: Synthetic oligonucleotide
  Target: COL7A1; (-) strand; PAM type: YTN; PAM sequence: CTG
gagcctgggactagcactga

SEQ ID NO: 26455 - DNA, 20 bp, Artificial Sequence
  Description of Artificial Sequence: Synthetic oligonucleotide
  Target: COL7A1; (-) strand; PAM type: YTN; PAM sequence: TTA
actggagcctgggactagca

SEQ ID NO: 26456 - DNA, 20 bp, Artificial Sequence
  Description of Artificial Sequence: Synthetic oligonucleotide
  Target: COL7A1; (-) strand; PAM type: YTN; PAM sequence: CTG
ggtcagggggttaactggag

SEQ ID NO: 26457 - DNA, 20 bp, Artificial Sequence
  Description of Artificial Sequence: Synthetic oligonucleotide
  Target: COL7A1; (-) strand; PAM type: YTN; PAM sequence: TTG
ctgggtcagggggttaactg

SEQ ID NO: 26458 - DNA, 20 bp, Artificial Sequence
  Description of Artificial Sequence: Synthetic oligonucleotide
  Target: COL7A1; (-) strand; PAM type: YTN; PAM sequence: CTT
gctgggtcagggggttaact

SEQ ID NO: 26459 - DNA, 20 bp, Artificial Sequence
  Description of Artificial Sequence: Synthetic oligonucleotide
  Target: COL7A1; (-) strand; PAM type: YTN; PAM sequence: TTG
gggggtcacaggacttgctg

SEQ ID NO: 26460 - DNA, 20 bp, Artificial Sequence
  Description of Artificial Sequence: Synthetic oligonucleotide
  Target: COL7A1; (-) strand; PAM type: YTN; PAM sequence: CTT
ggggggtcacaggacttgct

SEQ ID NO: 26461 - DNA, 20 bp, Artificial Sequence
  Description of Artificial Sequence: Synthetic oligonucleotide
  Target: COL7A1; (-) strand; PAM type: YTN; PAM sequence: CTA
tgggacttggggggtcacag

SEQ ID NO: 26462 - DNA, 20 bp, Artificial Sequence
  Description of Artificial Sequence: Synthetic oligonucleotide
  Target: COL7A1; (-) strand; PAM type: YTN; PAM sequence: CTA
tctatgggacttggggggtc

SEQ ID NO: 26463 - DNA, 20 bp, Artificial Sequence
  Description of Artificial Sequence: Synthetic oligonucleotide
  Target: COL7A1; (-) strand; PAM type: YTN; PAM sequence: CTA
ggtcatagggcctatctatg

SEQ ID NO: 26464 - DNA, 20 bp, Artificial Sequence
  Description of Artificial Sequence: Synthetic oligonucleotide
  Target: COL7A1; (-) strand; PAM type: YTN; PAM sequence: TTG
aggtctaggtcatagggcct

SEQ ID NO: 26465 - DNA, 20 bp, Artificial Sequence
  Description of Artificial Sequence: Synthetic oligonucleotide
  Target: COL7A1; (-) strand; PAM type: YTN; PAM sequence: CTA
cagggttgaggtctaggtca

SEQ ID NO: 26466 - DNA, 20 bp, Artificial Sequence
  Description of Artificial Sequence: Synthetic oligonucleotide
  Target: COL7A1; (-) strand; PAM type: YTN; PAM sequence: TTC
tacagggttgaggtctaggt

SEQ ID NO: 26467 - DNA, 20 bp, Artificial Sequence
  Description of Artificial Sequence: Synthetic oligonucleotide
  Target: COL7A1; (-) strand; PAM type: YTN; PAM sequence: TTT
ctacagggttgaggtctagg

SEQ ID NO: 26468 - DNA, 20 bp, Artificial Sequence
  Description of Artificial Sequence: Synthetic oligonucleotide
  Target: COL7A1; (-) strand; PAM type: YTN; PAM sequence: CTG
gtatggggcaaggggaggtt

SEQ ID NO: 26469 - DNA, 20 bp, Artificial Sequence
  Description of Artificial Sequence: Synthetic oligonucleotide
  Target: COL7A1; (-) strand; PAM type: YTN; PAM sequence: CTG
gacccaaaggagaaaaggta

SEQ ID NO: 26470 - DNA, 20 bp, Artificial Sequence
  Description of Artificial Sequence: Synthetic oligonucleotide
  Target: COL7A1; (-) strand; PAM type: YTN; PAM sequence: TTG
ctggacccaaaggagaaaag

SEQ ID NO: 26471 - DNA, 20 bp, Artificial Sequence
  Description of Artificial Sequence: Synthetic oligonucleotide
  Target: COL7A1; (-) strand; PAM type: YTN; PAM sequence: CTG
ttgctggacccaaaggagaa

SEQ ID NO: 26472 - DNA, 20 bp, Artificial Sequence
  Description of Artificial Sequence: Synthetic oligonucleotide
  Target: COL7A1; (-) strand; PAM type: YTN; PAM sequence: CTG
ctgttgctggacccaaagga

SEQ ID NO: 26473 - DNA, 20 bp, Artificial Sequence
  Description of Artificial Sequence: Synthetic oligonucleotide
  Target: COL7A1; (-) strand; PAM type: YTN; PAM sequence: TTC
agggacctgctgttgctgga

SEQ ID NO: 26474 - DNA, 20 bp, Artificial Sequence
  Description of Artificial Sequence: Synthetic oligonucleotide
  Target: COL7A1; (-) strand; PAM type: YTN; PAM sequence: TTT
cagggacctgctgttgctgg

SEQ ID NO: 26475 - DNA, 20 bp, Artificial Sequence
  Description of Artificial Sequence: Synthetic oligonucleotide
  Target: COL7A1; (-) strand; PAM type: YTN; PAM sequence: TTT
tcagggacctgctgttgctg

SEQ ID NO: 26476 - DNA, 20 bp, Artificial Sequence
  Description of Artificial Sequence: Synthetic oligonucleotide
  Target: COL7A1; (-) strand; PAM type: YTN; PAM sequence: TTG
ttttcagggacctgctgttg

SEQ ID NO: 26477 - DNA, 20 bp, Artificial Sequence
  Description of Artificial Sequence: Synthetic oligonucleotide
  Target: COL7A1; (-) strand; PAM type: YTN; PAM sequence: TTT
gttttcagggacctgctgtt

SEQ ID NO: 26478 - DNA, 20 bp, Artificial Sequence
  Description of Artificial Sequence: Synthetic oligonucleotide
  Target: COL7A1; (-) strand; PAM type: YTN; PAM sequence: CTG
tttgttttcagggacctgct

SEQ ID NO: 26479 - DNA, 20 bp, Artificial Sequence
  Description of Artificial Sequence: Synthetic oligonucleotide
  Target: COL7A1; (-) strand; PAM type: YTN; PAM sequence: CTG
tcctgtttgttttcagggac

SEQ ID NO: 26480 - DNA, 20 bp, Artificial Sequence
  Description of Artificial Sequence: Synthetic oligonucleotide
  Target: COL7A1; (-) strand; PAM type: YTN; PAM sequence: CTG
tatctgtcctgtttgttttc

SEQ ID NO: 26481 - DNA, 20 bp, Artificial Sequence
  Description of Artificial Sequence: Synthetic oligonucleotide
  Target: COL7A1; (-) strand; PAM type: YTN; PAM sequence: TTG
atcatacaaccccaaggcag

SEQ ID NO: 26482 - DNA, 20 bp, Artificial Sequence
  Description of Artificial Sequence: Synthetic oligonucleotide
  Target: COL7A1; (-) strand; PAM type: YTN; PAM sequence: TTT
gatcatacaaccccaaggca

SEQ ID NO: 26483 - DNA, 20 bp, Artificial Sequence
  Description of Artificial Sequence: Synthetic oligonucleotide
  Target: COL7A1; (-) strand; PAM type: YTN; PAM sequence: CTT
tgatcatacaaccccaaggc

SEQ ID NO: 26484 - DNA, 20 bp, Artificial Sequence
  Description of Artificial Sequence: Synthetic oligonucleotide
  Target: COL7A1; (-) strand; PAM type: YTN; PAM sequence: TTC
caatgaagactttgatcata

SEQ ID NO: 26485 - DNA, 20 bp, Artificial Sequence
  Description of Artificial Sequence: Synthetic oligonucleotide
  Target: COL7A1; (-) strand; PAM type: YTN; PAM sequence: CTC
cattccaatgaagactttga

SEQ ID NO: 26486 - DNA, 20 bp, Artificial Sequence
  Description of Artificial Sequence: Synthetic oligonucleotide
  Target: COL7A1; (-) strand; PAM type: YTN; PAM sequence: TTC
catgtgacctccattccaat

SEQ ID NO: 26487 - DNA, 20 bp, Artificial Sequence
  Description of Artificial Sequence: Synthetic oligonucleotide
  Target: COL7A1; (-) strand; PAM type: YTN; PAM sequence: TTC
caattccatgtgacctccat

SEQ ID NO: 26488 - DNA, 20 bp, Artificial Sequence
  Description of Artificial Sequence: Synthetic oligonucleotide
  Target: COL7A1; (-) strand; PAM type: YTN; PAM sequence: CTT
ccaattccatgtgacctcca

SEQ ID NO: 26489 - DNA, 20 bp, Artificial Sequence
  Description of Artificial Sequence: Synthetic oligonucleotide
  Target: COL7A1; (-) strand; PAM type: YTN; PAM sequence: CTG
tatgacttccaattccatgt

SEQ ID NO: 26490 - DNA, 20 bp, Artificial Sequence
  Description of Artificial Sequence: Synthetic oligonucleotide
  Target: COL7A1; (-) strand; PAM type: YTN; PAM sequence: CTG
agctgtatgacttccaattc

SEQ ID NO: 26491 - DNA, 20 bp, Artificial Sequence
  Description of Artificial Sequence: Synthetic oligonucleotide
  Target: COL7A1; (-) strand; PAM type: YTN; PAM sequence: CTG
ggcggggactgagctgtatg

SEQ ID NO: 26492 - DNA, 20 bp, Artificial Sequence
  Description of Artificial Sequence: Synthetic oligonucleotide
  Target: COL7A1; (-) strand; PAM type: YTN; PAM sequence: TTC
tgggcggggactgagctgta

SEQ ID NO: 26493 - DNA, 20 bp, Artificial Sequence
  Description of Artificial Sequence: Synthetic oligonucleotide
  Target: COL7A1; (-) strand; PAM type: YTN; PAM sequence: CTT
ctgggcggggactgagctgt

SEQ ID NO: 26494 - DNA, 20 bp, Artificial Sequence
  Description of Artificial Sequence: Synthetic oligonucleotide
  Target: COL7A1; (-) strand; PAM type: YTN; PAM sequence: CTG
tgacttctgggcggggactg

SEQ ID NO: 26495 - DNA, 20 bp, Artificial Sequence
  Description of Artificial Sequence: Synthetic oligonucleotide
  Target: COL7A1; (-) strand; PAM type: YTN; PAM sequence: CTC
tgtgacttctgggcggggac

SEQ ID NO: 26496 - DNA, 20 bp, Artificial Sequence
  Description of Artificial Sequence: Synthetic oligonucleotide
  Target: COL7A1; (-) strand; PAM type: YTN; PAM sequence: CTG
tcagcggtgactctgtgact

SEQ ID NO: 26497 - DNA, 20 bp, Artificial Sequence
  Description of Artificial Sequence: Synthetic oligonucleotide
  Target: COL7A1; (-) strand; PAM type: YTN; PAM sequence: CTG
ctgtcagcggtgactctgtg

SEQ ID NO: 26498 - DNA, 20 bp, Artificial Sequence
  Description of Artificial Sequence: Synthetic oligonucleotide
  Target: COL7A1; (-) strand; PAM type: YTN; PAM sequence: TTC
cctgctgtcagcggtgactc

SEQ ID NO: 26499 - DNA, 20 bp, Artificial Sequence
  Description of Artificial Sequence: Synthetic oligonucleotide
  Target: COL7A1; (-) strand; PAM type: YTN; PAM sequence: CTT
ccctgctgtcagcggtgact

SEQ ID NO: 26500 - DNA, 20 bp, Artificial Sequence
  Description of Artificial Sequence: Synthetic oligonucleotide
  Target: COL7A1; (-) strand; PAM type: YTN; PAM sequence: TTG
tataaccccttccctgctgt

SEQ ID NO: 26501 - DNA, 20 bp, Artificial Sequence
  Description of Artificial Sequence: Synthetic oligonucleotide
  Target: COL7A1; (-) strand; PAM type: YTN; PAM sequence: TTT
gtataaccccttccctgctg

SEQ ID NO: 26502 - DNA, 20 bp, Artificial Sequence
  Description of Artificial Sequence: Synthetic oligonucleotide
  Target: COL7A1; (-) strand; PAM type: YTN; PAM sequence: TTT
tgtataaccccttccctgct

SEQ ID NO: 26503 - DNA, 20 bp, Artificial Sequence
  Description of Artificial Sequence: Synthetic oligonucleotide
  Target: COL7A1; (-) strand; PAM type: YTN; PAM sequence: TTG
tgtcagtccattttgtataa

SEQ ID NO: 26504 - DNA, 20 bp, Artificial Sequence
  Description of Artificial Sequence: Synthetic oligonucleotide
  Target: COL7A1; (-) strand; PAM type: YTN; PAM sequence: TTT
gtgtcagtccattttgtata

SEQ ID NO: 26505 - DNA, 20 bp, Artificial Sequence
  Description of Artificial Sequence: Synthetic oligonucleotide
  Target: COL7A1; (-) strand; PAM type: YTN; PAM sequence: CTT
tgtgtcagtccattttgtat

SEQ ID NO: 26506 - DNA, 20 bp, Artificial Sequence
  Description of Artificial Sequence: Synthetic oligonucleotide
  Target: COL7A1; (-) strand; PAM type: YTN; PAM sequence: CTC
tttgtgtcagtccattttgt

SEQ ID NO: 26507 - DNA, 20 bp, Artificial Sequence
  Description of Artificial Sequence: Synthetic oligonucleotide
  Target: COL7A1; (-) strand; PAM type: YTN; PAM sequence: CTG
tgaccccaagaccgccatgc

SEQ ID NO: 26508 - DNA, 20 bp, Artificial Sequence
  Description of Artificial Sequence: Synthetic oligonucleotide
  Target: COL7A1; (-) strand; PAM type: YTN; PAM sequence: CTA
tgatcctgtgaccccaagac

SEQ ID NO: 26509 - DNA, 20 bp, Artificial Sequence
  Description of Artificial Sequence: Synthetic oligonucleotide
  Target: COL7A1; (-) strand; PAM type: YTN; PAM sequence: TTG
gctatgatcctgtgacccca

SEQ ID NO: 26510 - DNA, 20 bp, Artificial Sequence
  Description of Artificial Sequence: Synthetic oligonucleotide
  Target: COL7A1; (-) strand; PAM type: YTN; PAM sequence: CTT
ggctatgatcctgtgacccc

SEQ ID NO: 26511 - DNA, 20 bp, Artificial Sequence
  Description of Artificial Sequence: Synthetic oligonucleotide
  Target: COL7A1; (-) strand; PAM type: YTN; PAM sequence: CTC
ttggctatgatcctgtgacc

SEQ ID NO: 26512 - DNA, 20 bp, Artificial Sequence
  Description of Artificial Sequence: Synthetic oligonucleotide
  Target: COL7A1; (-) strand; PAM type: YTN; PAM sequence: CTG
cccccagactcttggctatg

SEQ ID NO: 26513 - DNA, 20 bp, Artificial Sequence
  Description of Artificial Sequence: Synthetic oligonucleotide
  Target: COL7A1; (-) strand; PAM type: YTN; PAM sequence: CTA
gaacctgcccccagactctt

SEQ ID NO: 26514 - DNA, 20 bp, Artificial Sequence
  Description of Artificial Sequence: Synthetic oligonucleotide
  Target: COL7A1; (-) strand; PAM type: YTN; PAM sequence: CTG
ctagaacctgcccccagact

SEQ ID NO: 26515 - DNA, 20 bp, Artificial Sequence
  Description of Artificial Sequence: Synthetic oligonucleotide
  Target: COL7A1; (-) strand; PAM type: YTN; PAM sequence: TTC
tgctagaacctgcccccaga

SEQ ID NO: 26516 - DNA, 20 bp, Artificial Sequence
  Description of Artificial Sequence: Synthetic oligonucleotide
  Target: COL7A1; (-) strand; PAM type: YTN; PAM sequence: CTT
ctgctagaacctgcccccag

SEQ ID NO: 26517 - DNA, 20 bp, Artificial Sequence
  Description of Artificial Sequence: Synthetic oligonucleotide
  Target: COL7A1; (-) strand; PAM type: YTN; PAM sequence: CTC
cttctgctagaacctgcccc

SEQ ID NO: 26518 - DNA, 20 bp, Artificial Sequence
  Description of Artificial Sequence: Synthetic oligonucleotide
  Target: COL7A1; (-) strand; PAM type: YTN; PAM sequence: CTC
tccttctgctagaacctgcc

SEQ ID NO: 26519 - DNA, 20 bp, Artificial Sequence
  Description of Artificial Sequence: Synthetic oligonucleotide
  Target: COL7A1; (-) strand; PAM type: YTN; PAM sequence: CTG
cggctctccttctgctagaa

SEQ ID NO: 26520 - DNA, 20 bp, Artificial Sequence
  Description of Artificial Sequence: Synthetic oligonucleotide
  Target: COL7A1; (-) strand; PAM type: YTN; PAM sequence: CTC
tgcggctctccttctgctag

SEQ ID NO: 26521 - DNA, 20 bp, Artificial Sequence
  Description of Artificial Sequence: Synthetic oligonucleotide
  Target: COL7A1; (-) strand; PAM type: YTN; PAM sequence: CTG
ggagctctgcggctctcctt

SEQ ID NO: 26522 - DNA, 20 bp, Artificial Sequence
  Description of Artificial Sequence: Synthetic oligonucleotide
  Target: COL7A1; (-) strand; PAM type: YTN; PAM sequence: CTG
ggcccgtgagcaggctggga

SEQ ID NO: 26523 - DNA, 20 bp, Artificial Sequence
  Description of Artificial Sequence: Synthetic oligonucleotide
  Target: COL7A1; (-) strand; PAM type: YTN; PAM sequence: TTC
cacagtgctgggcccgtgag

SEQ ID NO: 26524 - DNA, 20 bp, Artificial Sequence
  Description of Artificial Sequence: Synthetic oligonucleotide
  Target: COL7A1; (-) strand; PAM type: YTN; PAM sequence: CTG
tgattccacagtgctgggcc

SEQ ID NO: 26525 - DNA, 20 bp, Artificial Sequence
  Description of Artificial Sequence: Synthetic oligonucleotide
  Target: COL7A1; (-) strand; PAM type: YTN; PAM sequence: CTG
ggctgtgattccacagtgct

SEQ ID NO: 26526 - DNA, 20 bp, Artificial Sequence
  Description of Artificial Sequence: Synthetic oligonucleotide
  Target: COL7A1; (-) strand; PAM type: YTN; PAM sequence: CTA
tctgggctgtgattccacag

SEQ ID NO: 26527 - DNA, 20 bp, Artificial Sequence
  Description of Artificial Sequence: Synthetic oligonucleotide
  Target: COL7A1; (-) strand; PAM type: YTN; PAM sequence: CTA
tagaacactatctgggctgt

SEQ ID NO: 26528 - DNA, 20 bp, Artificial Sequence
  Description of Artificial Sequence: Synthetic oligonucleotide
  Target: COL7A1; (-) strand; PAM type: YTN; PAM sequence: CTC
ctatagaacactatctgggc

SEQ ID NO: 26529 - DNA, 20 bp, Artificial Sequence
  Description of Artificial Sequence: Synthetic oligonucleotide
  Target: COL7A1; (-) strand; PAM type: YTN; PAM sequence: TTG
agcagtgaccctcctataga

SEQ ID NO: 26530 - DNA, 20 bp, Artificial Sequence
  Description of Artificial Sequence: Synthetic oligonucleotide
  Target: COL7A1; (-) strand; PAM type: YTN; PAM sequence: CTT
gagcagtgaccctcctatag

SEQ ID NO: 26531 - DNA, 20 bp, Artificial Sequence
  Description of Artificial Sequence: Synthetic oligonucleotide
  Target: COL7A1; (-) strand; PAM type: YTN; PAM sequence: CTG
agcacagcacagcccttgag

SEQ ID NO: 26532 - DNA, 20 bp, Artificial Sequence
  Description of Artificial Sequence: Synthetic oligonucleotide
  Target: COL7A1; (-) strand; PAM type: YTN; PAM sequence: CTC
tgagcacagcacagcccttg

SEQ ID NO: 26533 - DNA, 20 bp, Artificial Sequence
  Description of Artificial Sequence: Synthetic oligonucleotide
  Target: COL7A1; (-) strand; PAM type: YTN; PAM sequence: CTG
cagtggtggtgagtgacggg

SEQ ID NO: 26534 - DNA, 20 bp, Artificial Sequence
  Description of Artificial Sequence: Synthetic oligonucleotide
  Target: COL7A1; (-) strand; PAM type: YTN; PAM sequence: CTG
gggaccctgcagtggtggtg

SEQ ID NO: 26535 - DNA, 20 bp, Artificial Sequence
  Description of Artificial Sequence: Synthetic oligonucleotide
  Target: COL7A1; (-) strand; PAM type: YTN; PAM sequence: CTG
gtcgccctggggaccctgca

SEQ ID NO: 26536 - DNA, 20 bp, Artificial Sequence
  Description of Artificial Sequence: Synthetic oligonucleotide
  Target: COL7A1; (-) strand; PAM type: YTN; PAM sequence: CTC
cacagggggagcctggtcgc

SEQ ID NO: 26537 - DNA, 20 bp, Artificial Sequence
  Description of Artificial Sequence: Synthetic oligonucleotide
  Target: COL7A1; (-) strand; PAM type: YTN; PAM sequence: CTC
tccacagggggagcctggtc

SEQ ID NO: 26538 - DNA, 20 bp, Artificial Sequence
  Description of Artificial Sequence: Synthetic oligonucleotide
  Target: COL7A1; (-) strand; PAM type: YTN; PAM sequence: CTC
tctccacagggggagcctgg

SEQ ID NO: 26539 - DNA, 20 bp, Artificial Sequence
  Description of Artificial Sequence: Synthetic oligonucleotide
  Target: COL7A1; (-) strand; PAM type: YTN; PAM sequence: CTA
tcctctctccacagggggag

SEQ ID NO: 26540 - DNA, 20 bp, Artificial Sequence
  Description of Artificial Sequence: Synthetic oligonucleotide
  Target: COL7A1; (-) strand; PAM type: YTN; PAM sequence: CTC
ctatcctctctccacagggg

SEQ ID NO: 26541 - DNA, 20 bp, Artificial Sequence
  Description of Artificial Sequence: Synthetic oligonucleotide
  Target: COL7A1; (-) strand; PAM type: YTN; PAM sequence: CTG
ctcctatcctctctccacag

SEQ ID NO: 26542 - DNA, 20 bp, Artificial Sequence
  Description of Artificial Sequence: Synthetic oligonucleotide
  Target: COL7A1; (-) strand; PAM type: YTN; PAM sequence: CTG
tccctgctcctatcctctct

SEQ ID NO: 26543 - DNA, 20 bp, Artificial Sequence
  Description of Artificial Sequence: Synthetic oligonucleotide
  Target: COL7A1; (-) strand; PAM type: YTN; PAM sequence: CTG
acctgtccctgctcctatcc

SEQ ID NO: 26544 - DNA, 20 bp, Artificial Sequence
  Description of Artificial Sequence: Synthetic oligonucleotide
  Target: COL7A1; (-) strand; PAM type: YTN; PAM sequence: CTC
cctgacctgtccctgctcct

SEQ ID NO: 26545 - DNA, 20 bp, Artificial Sequence
  Description of Artificial Sequence: Synthetic oligonucleotide
  Target: COL7A1; (-) strand; PAM type: YTN; PAM sequence: CTA
ggtgactccctgacctgtcc

SEQ ID NO: 26546 - DNA, 20 bp, Artificial Sequence
  Description of Artificial Sequence: Synthetic oligonucleotide
  Target: COL7A1; (-) strand; PAM type: YTN; PAM sequence: CTC
ctaggtgactccctgacctg

SEQ ID NO: 26547 - DNA, 20 bp, Artificial Sequence
  Description of Artificial Sequence: Synthetic oligonucleotide
  Target: COL7A1; (-) strand; PAM type: YTN; PAM sequence: TTG
ggctcctaggtgactccctg

SEQ ID NO: 26548 - DNA, 20 bp, Artificial Sequence
  Description of Artificial Sequence: Synthetic oligonucleotide
  Target: COL7A1; (-) strand; PAM type: YTN; PAM sequence: TTT
gggctcctaggtgactccct

SEQ ID NO: 26549 - DNA, 20 bp, Artificial Sequence
  Description of Artificial Sequence: Synthetic oligonucleotide
  Target: COL7A1; (-) strand; PAM type: YTN; PAM sequence: TTT
tgggctcctaggtgactccc

SEQ ID NO: 26550 - DNA, 20 bp, Artificial Sequence
  Description of Artificial Sequence: Synthetic oligonucleotide
  Target: COL7A1; (-) strand; PAM type: YTN; PAM sequence: CTG
ggattttgggctcctaggtg

SEQ ID NO: 26551 - DNA, 20 bp, Artificial Sequence
  Description of Artificial Sequence: Synthetic oligonucleotide
  Target: COL7A1; (-) strand; PAM type: YTN; PAM sequence: CTA
gggatgtggcagatgggaca

SEQ ID NO: 26552 - DNA, 20 bp, Artificial Sequence
  Description of Artificial Sequence: Synthetic oligonucleotide
  Target: COL7A1; (-) strand; PAM type: YTN; PAM sequence: CTG
gtactagggatgtggcagat

SEQ ID NO: 26553 - DNA, 20 bp, Artificial Sequence
  Description of Artificial Sequence: Synthetic oligonucleotide
  Target: COL7A1; (-) strand; PAM type: YTN; PAM sequence: CTG
tctggtactagggatgtggc

SEQ ID NO: 26554 - DNA, 20 bp, Artificial Sequence
  Description of Artificial Sequence: Synthetic oligonucleotide
  Target: COL7A1; (-) strand; PAM type: YTN; PAM sequence: CTG
ggggtggcactgtctggtac

SEQ ID NO: 26555 - DNA, 20 bp, Artificial Sequence
  Description of Artificial Sequence: Synthetic oligonucleotide
  Target: COL7A1; (-) strand; PAM type: YTN; PAM sequence: CTC
ggctgggggtggcactgtct

SEQ ID NO: 26556 - DNA, 20 bp, Artificial Sequence
  Description of Artificial Sequence: Synthetic oligonucleotide
  Target: COL7A1; (-) strand; PAM type: YTN; PAM sequence: CTG
gccgccaaggagagaaggtg

SEQ ID NO: 26557 - DNA, 20 bp, Artificial Sequence
  Description of Artificial Sequence: Synthetic oligonucleotide
  Target: COL7A1; (-) strand; PAM type: YTN; PAM sequence: TTC
aggggccaccaggacccact

SEQ ID NO: 26558 - DNA, 20 bp, Artificial Sequence
  Description of Artificial Sequence: Synthetic oligonucleotide
  Target: COL7A1; (-) strand; PAM type: YTN; PAM sequence: CTA
cattcaggggccaccaggac

SEQ ID NO: 26559 - DNA, 20 bp, Artificial Sequence
  Description of Artificial Sequence: Synthetic oligonucleotide
  Target: COL7A1; (-) strand; PAM type: YTN; PAM sequence: CTC
tacattcaggggccaccagg

SEQ ID NO: 26560 - DNA, 20 bp, Artificial Sequence
  Description of Artificial Sequence: Synthetic oligonucleotide
  Target: COL7A1; (-) strand; PAM type: YTN; PAM sequence: TTC
tctacattcaggggccacca

SEQ ID NO: 26561 - DNA, 20 bp, Artificial Sequence
  Description of Artificial Sequence: Synthetic oligonucleotide
  Target: COL7A1; (-) strand; PAM type: YTN; PAM sequence: TTT
ctctacattcaggggccacc

SEQ ID NO: 26562 - DNA, 20 bp, Artificial Sequence
  Description of Artificial Sequence: Synthetic oligonucleotide
  Target: COL7A1; (-) strand; PAM type: YTN; PAM sequence: CTT
tctctacattcaggggccac

SEQ ID NO: 26563 - DNA, 20 bp, Artificial Sequence
  Description of Artificial Sequence: Synthetic oligonucleotide
  Target: COL7A1; (-) strand; PAM type: YTN; PAM sequence: CTC
acactttctctacattcagg

SEQ ID NO: 26564 - DNA, 20 bp, Artificial Sequence
  Description of Artificial Sequence: Synthetic oligonucleotide
  Target: COL7A1; (-) strand; PAM type: YTN; PAM sequence: CTG
ggctcacactttctctacat

SEQ ID NO: 26565 - DNA, 20 bp, Artificial Sequence
  Description of Artificial Sequence: Synthetic oligonucleotide
  Target: COL7A1; (-) strand; PAM type: YTN; PAM sequence: CTC
ctgggctcacactttctcta

SEQ ID NO: 26566 - DNA, 20 bp, Artificial Sequence
  Description of Artificial Sequence: Synthetic oligonucleotide
  Target: COL7A1; (-) strand; PAM type: YTN; PAM sequence: TTC
ccctcctgggctcacacttt

SEQ ID NO: 26567 - DNA, 20 bp, Artificial Sequence
  Description of Artificial Sequence: Synthetic oligonucleotide
  Target: COL7A1; (-) strand; PAM type: YTN; PAM sequence: CTT
cccctcctgggctcacactt

SEQ ID NO: 26568 - DNA, 20 bp, Artificial Sequence
  Description of Artificial Sequence: Synthetic oligonucleotide
  Target: COL7A1; (-) strand; PAM type: YTN; PAM sequence: TTC
ccttcccctcctgggctcac

SEQ ID NO: 26569 - DNA, 20 bp, Artificial Sequence
  Description of Artificial Sequence: Synthetic oligonucleotide
  Target: COL7A1; (-) strand; PAM type: YTN; PAM sequence: TTT
cccttcccctcctgggctca

SEQ ID NO: 26570 - DNA, 20 bp, Artificial Sequence
  Description of Artificial Sequence: Synthetic oligonucleotide
  Target: COL7A1; (-) strand; PAM type: YTN; PAM sequence: CTT
tcccttcccctcctgggctc

SEQ ID NO: 26571 - DNA, 20 bp, Artificial Sequence
  Description of Artificial Sequence: Synthetic oligonucleotide
  Target: COL7A1; (-) strand; PAM type: YTN; PAM sequence: CTC
ccctttcccttcccctcctg

SEQ ID NO: 26572 - DNA, 20 bp, Artificial Sequence
  Description of Artificial Sequence: Synthetic oligonucleotide
  Target: COL7A1; (-) strand; PAM type: YTN; PAM sequence: TTG
tgtgtccctcccctttccct

SEQ ID NO: 26573 - DNA, 20 bp, Artificial Sequence
  Description of Artificial Sequence: Synthetic oligonucleotide
  Target: COL7A1; (-) strand; PAM type: YTN; PAM sequence: TTT
gtgtgtccctcccctttccc

SEQ ID NO: 26574 - DNA, 20 bp, Artificial Sequence
  Description of Artificial Sequence: Synthetic oligonucleotide
  Target: COL7A1; (-) strand; PAM type: YTN; PAM sequence: TTT
tgtgtgtccctcccctttcc

SEQ ID NO: 26575 - DNA, 20 bp, Artificial Sequence
  Description of Artificial Sequence: Synthetic oligonucleotide
  Target: COL7A1; (-) strand; PAM type: YTN; PAM sequence: CTT
ttgtgtgtccctcccctttc

SEQ ID NO: 26576 - DNA, 20 bp, Artificial Sequence
  Description of Artificial Sequence: Synthetic oligonucleotide
  Target: COL7A1; (-) strand; PAM type: YTN; PAM sequence: CTG
tggtgggaccaggagtggga

SEQ ID NO: 26577 - DNA, 20 bp, Artificial Sequence
  Description of Artificial Sequence: Synthetic oligonucleotide
  Target: COL7A1; (-) strand; PAM type: YTN; PAM sequence: CTG
tgactgtggtgggaccagga

SEQ ID NO: 26578 - DNA, 20 bp, Artificial Sequence
  Description of Artificial Sequence: Synthetic oligonucleotide
  Target: COL7A1; (-) strand; PAM type: YTN; PAM sequence: CTG
aagtgagtctgtgactgtgg

SEQ ID NO: 26579 - DNA, 20 bp, Artificial Sequence
  Description of Artificial Sequence: Synthetic oligonucleotide
  Target: COL7A1; (-) strand; PAM type: YTN; PAM sequence: CTG
gagccaagggtcctgaagtg

SEQ ID NO: 26580 - DNA, 20 bp, Artificial Sequence
  Description of Artificial Sequence: Synthetic oligonucleotide
  Target: COL7A1; (-) strand; PAM type: YTN; PAM sequence: CTG
gacgtcctggagccaagggt

SEQ ID NO: 26581 - DNA, 20 bp, Artificial Sequence
  Description of Artificial Sequence: Synthetic oligonucleotide
  Target: COL7A1; (-) strand; PAM type: YTN; PAM sequence: TTG
ctggacgtcctggagccaag

SEQ ID NO: 26582 - DNA, 20 bp, Artificial Sequence
  Description of Artificial Sequence: Synthetic oligonucleotide
  Target: COL7A1; (-) strand; PAM type: YTN; PAM sequence: CTG
ccaggggttgctggacgtcc

SEQ ID NO: 26583 - DNA, 20 bp, Artificial Sequence
  Description of Artificial Sequence: Synthetic oligonucleotide
  Target: COL7A1; (-) strand; PAM type: YTN; PAM sequence: CTC
caggggctgccaggggttgc

SEQ ID NO: 26584 - DNA, 20 bp, Artificial Sequence
  Description of Artificial Sequence: Synthetic oligonucleotide
  Target: COL7A1; (-) strand; PAM type: YTN; PAM sequence: CTC
ctccaggggctgccaggggt

SEQ ID NO: 26585 - DNA, 20 bp, Artificial Sequence
  Description of Artificial Sequence: Synthetic oligonucleotide
  Target: COL7A1; (-) strand; PAM type: YTN; PAM sequence: CTC
tcctccaggggctgccaggg

SEQ ID NO: 26586 - DNA, 20 bp, Artificial Sequence
  Description of Artificial Sequence: Synthetic oligonucleotide
  Target: COL7A1; (-) strand; PAM type: YTN; PAM sequence: TTC
ctctcctccaggggctgcca

SEQ ID NO: 26587 - DNA, 20 bp, Artificial Sequence
  Description of Artificial Sequence: Synthetic oligonucleotide
  Target: COL7A1; (-) strand; PAM type: YTN; PAM sequence: CTT
cctctcctccaggggctgcc

SEQ ID NO: 26588 - DNA, 20 bp, Artificial Sequence
  Description of Artificial Sequence: Synthetic oligonucleotide
  Target: COL7A1; (-) strand; PAM type: YTN; PAM sequence: TTC
ccttcctctcctccaggggc

SEQ ID NO: 26589 - DNA, 20 bp, Artificial Sequence
  Description of Artificial Sequence: Synthetic oligonucleotide
  Target: COL7A1; (-) strand; PAM type: YTN; PAM sequence: CTT
cccttcctctcctccagggg

SEQ ID NO: 26590 - DNA, 20 bp, Artificial Sequence
  Description of Artificial Sequence: Synthetic oligonucleotide
  Target: COL7A1; (-) strand; PAM type: YTN; PAM sequence: CTC
ttcccttcctctcctccagg

SEQ ID NO: 26591 - DNA, 20 bp, Artificial Sequence
  Description of Artificial Sequence: Synthetic oligonucleotide
  Target: COL7A1; (-) strand; PAM type: YTN; PAM sequence: CTG
cacagctcttcccttcctct

SEQ ID NO: 26592 - DNA, 20 bp, Artificial Sequence
  Description of Artificial Sequence: Synthetic oligonucleotide
  Target: COL7A1; (-) strand; PAM type: YTN; PAM sequence: CTG
tccatatcccccgtccccac

SEQ ID NO: 26593 - DNA, 20 bp, Artificial Sequence
  Description of Artificial Sequence: Synthetic oligonucleotide
  Target: COL7A1; (-) strand; PAM type: YTN; PAM sequence: CTG
tctgtccatatcccccgtcc

SEQ ID NO: 26594 - DNA, 20 bp, Artificial Sequence
  Description of Artificial Sequence: Synthetic oligonucleotide
  Target: COL7A1; (-) strand; PAM type: YTN; PAM sequence: CTA
gccctgtctgtccatatccc

SEQ ID NO: 26595 - DNA, 20 bp, Artificial Sequence
  Description of Artificial Sequence: Synthetic oligonucleotide
  Target: COL7A1; (-) strand; PAM type: YTN; PAM sequence: CTC
tagccctgtctgtccatatc

SEQ ID NO: 26596 - DNA, 20 bp, Artificial Sequence
  Description of Artificial Sequence: Synthetic oligonucleotide
  Target: COL7A1; (-) strand; PAM type: YTN; PAM sequence: CTC
cagcccccaccccagcctct

SEQ ID NO: 26597 - DNA, 20 bp, Artificial Sequence
  Description of Artificial Sequence: Synthetic oligonucleotide
  Target: COL7A1; (-) strand; PAM type: YTN; PAM sequence: CTC
tccagcccccaccccagcct

SEQ ID NO: 26598 - DNA, 20 bp, Artificial Sequence
  Description of Artificial Sequence: Synthetic oligonucleotide
  Target: COL7A1; (-) strand; PAM type: YTN; PAM sequence: CTG
acccctctccagcccccacc

SEQ ID NO: 26599 - DNA, 20 bp, Artificial Sequence
  Description of Artificial Sequence: Synthetic oligonucleotide
  Target: COL7A1; (-) strand; PAM type: YTN; PAM sequence: TTC
cctgacccctctccagcccc

SEQ ID NO: 26600 - DNA, 20 bp, Artificial Sequence
  Description of Artificial Sequence: Synthetic oligonucleotide
  Target: COL7A1; (-) strand; PAM type: YTN; PAM sequence: CTT
ccctgacccctctccagccc

SEQ ID NO: 26601 - DNA, 20 bp, Artificial Sequence
  Description of Artificial Sequence: Synthetic oligonucleotide
  Target: COL7A1; (-) strand; PAM type: YTN; PAM sequence: CTA
aatcccaatcttccctgacc

SEQ ID NO: 26602 - DNA, 20 bp, Artificial Sequence
  Description of Artificial Sequence: Synthetic oligonucleotide
  Target: COL7A1; (-) strand; PAM type: YTN; PAM sequence: CTG
ccaacctaaatcccaatctt

SEQ ID NO: 26603 - DNA, 20 bp, Artificial Sequence
  Description of Artificial Sequence: Synthetic oligonucleotide
  Target: COL7A1; (-) strand; PAM type: YTN; PAM sequence: TTA
cccctgccaacctaaatccc

SEQ ID NO: 26604 - DNA, 20 bp, Artificial Sequence
  Description of Artificial Sequence: Synthetic oligonucleotide
  Target: COL7A1; (-) strand; PAM type: YTN; PAM sequence: CTT
acccctgccaacctaaatcc

SEQ ID NO: 26605 - DNA, 20 bp, Artificial Sequence
  Description of Artificial Sequence: Synthetic oligonucleotide
  Target: COL7A1; (-) strand; PAM type: YTN; PAM sequence: CTG
ccaagtcttacccctgccaa

SEQ ID NO: 26606 - DNA, 20 bp, Artificial Sequence
  Description of Artificial Sequence: Synthetic oligonucleotide
  Target: COL7A1; (-) strand; PAM type: YTN; PAM sequence: CTC
ctgccaagtcttacccctgc

SEQ ID NO: 26607 - DNA, 20 bp, Artificial Sequence
  Description of Artificial Sequence: Synthetic oligonucleotide
  Target: COL7A1; (-) strand; PAM type: YTN; PAM sequence: TTC
tcctgccaagtcttacccct

SEQ ID NO: 26608 - DNA, 20 bp, Artificial Sequence
  Description of Artificial Sequence: Synthetic oligonucleotide
  Target: COL7A1; (-) strand; PAM type: YTN; PAM sequence: CTG
ttctcctgccaagtcttacc

SEQ ID NO: 26609 - DNA, 20 bp, Artificial Sequence
  Description of Artificial Sequence: Synthetic oligonucleotide
  Target: COL7A1; (-) strand; PAM type: YTN; PAM sequence: CTC
tgttctcctgccaagtctta

SEQ ID NO: 26610 - DNA, 20 bp, Artificial Sequence
  Description of Artificial Sequence: Synthetic oligonucleotide
  Target: COL7A1; (-) strand; PAM type: YTN; PAM sequence: CTG
gtctctgttctcctgccaag

SEQ ID NO: 26611 - DNA, 20 bp, Artificial Sequence
  Description of Artificial Sequence: Synthetic oligonucleotide
  Target: COL7A1; (-) strand; PAM type: YTN; PAM sequence: CTG
acctggtctctgttctcctg

SEQ ID NO: 26612 - DNA, 20 bp, Artificial Sequence
  Description of Artificial Sequence: Synthetic oligonucleotide
  Target: COL7A1; (-) strand; PAM type: YTN; PAM sequence: TTC
actgacctggtctctgttct

SEQ ID NO: 26613 - DNA, 20 bp, Artificial Sequence
  Description of Artificial Sequence: Synthetic oligonucleotide
  Target: COL7A1; (-) strand; PAM type: YTN; PAM sequence: TTT
cactgacctggtctctgttc

SEQ ID NO: 26614 - DNA, 20 bp, Artificial Sequence
  Description of Artificial Sequence: Synthetic oligonucleotide
  Target: COL7A1; (-) strand; PAM type: YTN; PAM sequence: TTT
tcactgacctggtctctgtt

SEQ ID NO: 26615 - DNA, 20 bp, Artificial Sequence
  Description of Artificial Sequence: Synthetic oligonucleotide
  Target: COL7A1; (-) strand; PAM type: YTN; PAM sequence: TTG
attttcactgacctggtctc

SEQ ID NO: 26616 - DNA, 20 bp, Artificial Sequence
  Description of Artificial Sequence: Synthetic oligonucleotide
  Target: COL7A1; (-) strand; PAM type: YTN; PAM sequence: CTT
gattttcactgacctggtct

SEQ ID NO: 26617 - DNA, 20 bp, Artificial Sequence
  Description of Artificial Sequence: Synthetic oligonucleotide
  Target: COL7A1; (-) strand; PAM type: YTN; PAM sequence: CTG
accttgattttcactgacct

SEQ ID NO: 26618 - DNA, 20 bp, Artificial Sequence
  Description of Artificial Sequence: Synthetic oligonucleotide
  Target: COL7A1; (-) strand; PAM type: YTN; PAM sequence: CTG
aactgaccttgattttcact

SEQ ID NO: 26619 - DNA, 20 bp, Artificial Sequence
  Description of Artificial Sequence: Synthetic oligonucleotide
  Target: COL7A1; (-) strand; PAM type: YTN; PAM sequence: CTG
ctgaactgaccttgattttc

SEQ ID NO: 26620 - DNA, 20 bp, Artificial Sequence
  Description of Artificial Sequence: Synthetic oligonucleotide
  Target: COL7A1; (-) strand; PAM type: YTN; PAM sequence: CTG
accctgctgaactgaccttg

SEQ ID NO: 26621 - DNA, 20 bp, Artificial Sequence
  Description of Artificial Sequence: Synthetic oligonucleotide
  Target: COL7A1; (-) strand; PAM type: YTN; PAM sequence: CTC
tgaccctgctgaactgacct

SEQ ID NO: 26622 - DNA, 20 bp, Artificial Sequence
  Description of Artificial Sequence: Synthetic oligonucleotide
  Target: COL7A1; (-) strand; PAM type: YTN; PAM sequence: TTG
aacctctgaccctgctgaac

SEQ ID NO: 26623 - DNA, 20 bp, Artificial Sequence
  Description of Artificial Sequence: Synthetic oligonucleotide
  Target: COL7A1; (-) strand; PAM type: YTN; PAM sequence: TTT
gaacctctgaccctgctgaa

SEQ ID NO: 26624 - DNA, 20 bp, Artificial Sequence
  Description of Artificial Sequence: Synthetic oligonucleotide
  Target: COL7A1; (-) strand; PAM type: YTN; PAM sequence: CTT
tgaacctctgaccctgctga

SEQ ID NO: 26625 - DNA, 20 bp, Artificial Sequence
  Description of Artificial Sequence: Synthetic oligonucleotide
  Target: COL7A1; (-) strand; PAM type: YTN; PAM sequence: CTG
gctttgaacctctgaccctg

SEQ ID NO: 26626 - DNA, 20 bp, Artificial Sequence
  Description of Artificial Sequence: Synthetic oligonucleotide
  Target: COL7A1; (-) strand; PAM type: YTN; PAM sequence: CTC
agccccagggacctggcttt

SEQ ID NO: 26627 - DNA, 20 bp, Artificial Sequence
  Description of Artificial Sequence: Synthetic oligonucleotide
  Target: COL7A1; (-) strand; PAM type: YTN; PAM sequence: CTA
accctcagccccagggacct

SEQ ID NO: 26628 - DNA, 20 bp, Artificial Sequence
  Description of Artificial Sequence: Synthetic oligonucleotide
  Target: COL7A1; (-) strand; PAM type: YTN; PAM sequence: CTC
taaccctcagccccagggac

SEQ ID NO: 26629 - DNA, 20 bp, Artificial Sequence
  Description of Artificial Sequence: Synthetic oligonucleotide
  Target: COL7A1; (-) strand; PAM type: YTN; PAM sequence: CTG
atacaggctctaaccctcag

SEQ ID NO: 26630 - DNA, 20 bp, Artificial Sequence
  Description of Artificial Sequence: Synthetic oligonucleotide
  Target: COL7A1; (-) strand; PAM type: YTN; PAM sequence: CTG
ctgatacaggctctaaccct

SEQ ID NO: 26631 - DNA, 20 bp, Artificial Sequence
  Description of Artificial Sequence: Synthetic oligonucleotide
  Target: COL7A1; (-) strand; PAM type: YTN; PAM sequence: TTA
tccctgctgatacaggctct

SEQ ID NO: 26632 - DNA, 20 bp, Artificial Sequence
  Description of Artificial Sequence: Synthetic oligonucleotide
  Target: COL7A1; (-) strand; PAM type: YTN; PAM sequence: CTT
atccctgctgatacaggctc

SEQ ID NO: 26633 - DNA, 20 bp, Artificial Sequence
  Description of Artificial Sequence: Synthetic oligonucleotide
  Target: COL7A1; (-) strand; PAM type: YTN; PAM sequence: CTC
aatgaccacttatccctgct

SEQ ID NO: 26634 - DNA, 20 bp, Artificial Sequence
  Description of Artificial Sequence: Synthetic oligonucleotide
  Target: COL7A1; (-) strand; PAM type: YTN; PAM sequence: CTC
ctcaatgaccacttatccct

SEQ ID NO: 26635 - DNA, 20 bp, Artificial Sequence
  Description of Artificial Sequence: Synthetic oligonucleotide
  Target: COL7A1; (-) strand; PAM type: YTN; PAM sequence: CTC
acccctcctcaatgaccact

SEQ ID NO: 26636 - DNA, 20 bp, Artificial Sequence
  Description of Artificial Sequence: Synthetic oligonucleotide
  Target: COL7A1; (-) strand; PAM type: YTN; PAM sequence: CTC
ctcacccctcctcaatgacc

SEQ ID NO: 26637 - DNA, 20 bp, Artificial Sequence
  Description of Artificial Sequence: Synthetic oligonucleotide
  Target: COL7A1; (-) strand; PAM type: YTN; PAM sequence: CTG
ctcctcacccctcctcaatg

SEQ ID NO: 26638 - DNA, 20 bp, Artificial Sequence
  Description of Artificial Sequence: Synthetic oligonucleotide
  Target: COL7A1; (-) strand; PAM type: YTN; PAM sequence: CTA
cccctgctcctcacccctcc

SEQ ID NO: 26639 - DNA, 20 bp, Artificial Sequence
  Description of Artificial Sequence: Synthetic oligonucleotide
  Target: COL7A1; (-) strand; PAM type: YTN; PAM sequence: CTG
ctacccctgctcctcacccc

SEQ ID NO: 26640 - DNA, 20 bp, Artificial Sequence
  Description of Artificial Sequence: Synthetic oligonucleotide
  Target: COL7A1; (-) strand; PAM type: YTN; PAM sequence: TTG
acccctgctacccctgctcc

SEQ ID NO: 26641 - DNA, 20 bp, Artificial Sequence
  Description of Artificial Sequence: Synthetic oligonucleotide
  Target: COL7A1; (-) strand; PAM type: YTN; PAM sequence: CTT
gacccctgctacccctgctc

SEQ ID NO: 26642 - DNA, 20 bp, Artificial Sequence
  Description of Artificial Sequence: Synthetic oligonucleotide
  Target: COL7A1; (-) strand; PAM type: YTN; PAM sequence: TTG
cccttgacccctgctacccc

SEQ ID NO: 26643 - DNA, 20 bp, Artificial Sequence
  Description of Artificial Sequence: Synthetic oligonucleotide
  Target: COL7A1; (-) strand; PAM type: YTN; PAM sequence: CTT
gcccttgacccctgctaccc

SEQ ID NO: 26644 - DNA, 20 bp, Artificial Sequence
  Description of Artificial Sequence: Synthetic oligonucleotide
  Target: COL7A1; (-) strand; PAM type: YTN; PAM sequence: TTC
ttgcccttgacccctgctac

SEQ ID NO: 26645 - DNA, 20 bp, Artificial Sequence
  Description of Artificial Sequence: Synthetic oligonucleotide
  Target: COL7A1; (-) strand; PAM type: YTN; PAM sequence: CTT
cttgcccttgacccctgcta

SEQ ID NO: 26646 - DNA, 20 bp, Artificial Sequence
  Description of Artificial Sequence: Synthetic oligonucleotide
  Target: COL7A1; (-) strand; PAM type: YTN; PAM sequence: CTG
acttcttgcccttgacccct

SEQ ID NO: 26647 - DNA, 20 bp, Artificial Sequence
  Description of Artificial Sequence: Synthetic oligonucleotide
  Target: COL7A1; (-) strand; PAM type: YTN; PAM sequence: TTC
tgacttcttgcccttgaccc

SEQ ID NO: 26648 - DNA, 20 bp, Artificial Sequence
  Description of Artificial Sequence: Synthetic oligonucleotide
  Target: COL7A1; (-) strand; PAM type: YTN; PAM sequence: CTG
gttctgacttcttgcccttg

SEQ ID NO: 26649 - DNA, 20 bp, Artificial Sequence
  Description of Artificial Sequence: Synthetic oligonucleotide
  Target: COL7A1; (-) strand; PAM type: YTN; PAM sequence: TTC
tggttctgacttcttgccct

SEQ ID NO: 26650 - DNA, 20 bp, Artificial Sequence
  Description of Artificial Sequence: Synthetic oligonucleotide
  Target: COL7A1; (-) strand; PAM type: YTN; PAM sequence: TTT
ctggttctgacttcttgccc

SEQ ID NO: 26651 - DNA, 20 bp, Artificial Sequence
  Description of Artificial Sequence: Synthetic oligonucleotide
  Target: COL7A1; (-) strand; PAM type: YTN; PAM sequence: CTT
tctggttctgacttcttgcc

SEQ ID NO: 26652 - DNA, 20 bp, Artificial Sequence
  Description of Artificial Sequence: Synthetic oligonucleotide
  Target: COL7A1; (-) strand; PAM type: YTN; PAM sequence: CTG
tgccctttctggttctgact

SEQ ID NO: 26653 - DNA, 20 bp, Artificial Sequence
  Description of Artificial Sequence: Synthetic oligonucleotide
  Target: COL7A1; (-) strand; PAM type: YTN; PAM sequence: CTG
gctgtgccctttctggttct

SEQ ID NO: 26654 - DNA, 20 bp, Artificial Sequence
  Description of Artificial Sequence: Synthetic oligonucleotide
  Target: COL7A1; (-) strand; PAM type: YTN; PAM sequence: CTG
acctggctgtgccctttctg

SEQ ID NO: 26655 - DNA, 20 bp, Artificial Sequence
  Description of Artificial Sequence: Synthetic oligonucleotide
  Target: COL7A1; (-) strand; PAM type: YTN; PAM sequence: CTC
ataccagctgacctggctgt

SEQ ID NO: 26656 - DNA, 20 bp, Artificial Sequence
  Description of Artificial Sequence: Synthetic oligonucleotide
  Target: COL7A1; (-) strand; PAM type: YTN; PAM sequence: CTG
caatgctcataccagctgac

SEQ ID NO: 26657 - DNA, 20 bp, Artificial Sequence
  Description of Artificial Sequence: Synthetic oligonucleotide
  Target: COL7A1; (-) strand; PAM type: YTN; PAM sequence: CTG
gctgcaatgctcataccagc

SEQ ID NO: 26658 - DNA, 20 bp, Artificial Sequence
  Description of Artificial Sequence: Synthetic oligonucleotide
  Target: COL7A1; (-) strand; PAM type: YTN; PAM sequence: TTC
catcagggcgaacgtggacc

SEQ ID NO: 26659 - DNA, 20 bp, Artificial Sequence
  Description of Artificial Sequence: Synthetic oligonucleotide
  Target: COL7A1; (-) strand; PAM type: YTN; PAM sequence: TTT
ccatcagggcgaacgtggac

SEQ ID NO: 26660 - DNA, 20 bp, Artificial Sequence
  Description of Artificial Sequence: Synthetic oligonucleotide
  Target: COL7A1; (-) strand; PAM type: YTN; PAM sequence: TTT
tccatcagggcgaacgtgga

SEQ ID NO: 26661 - DNA, 20 bp, Artificial Sequence
  Description of Artificial Sequence: Synthetic oligonucleotide
  Target: COL7A1; (-) strand; PAM type: YTN; PAM sequence: CTT
ttccatcagggcgaacgtgg

SEQ ID NO: 26662 - DNA, 20 bp, Artificial Sequence
  Description of Artificial Sequence: Synthetic oligonucleotide
  Target: COL7A1; (-) strand; PAM type: YTN; PAM sequence: TTC
ttttccatcagggcgaacgt

SEQ ID NO: 26663 - DNA, 20 bp, Artificial Sequence
  Description of Artificial Sequence: Synthetic oligonucleotide
  Target: COL7A1; (-) strand; PAM type: YTN; PAM sequence: CTT
cttttccatcagggcgaacg

SEQ ID NO: 26664 - DNA, 20 bp, Artificial Sequence
  Description of Artificial Sequence: Synthetic oligonucleotide
  Target: COL7A1; (-) strand; PAM type: YTN; PAM sequence: CTC
ttcttttccatcagggcgaa

SEQ ID NO: 26665 - DNA, 20 bp, Artificial Sequence
  Description of Artificial Sequence: Synthetic oligonucleotide
  Target: COL7A1; (-) strand; PAM type: YTN; PAM sequence: CTG
acctcttcttttccatcagg

SEQ ID NO: 26666 - DNA, 20 bp, Artificial Sequence
  Description of Artificial Sequence: Synthetic oligonucleotide
  Target: COL7A1; (-) strand; PAM type: YTN; PAM sequence: CTC
tgacctcttcttttccatca

SEQ ID NO: 26667 - DNA, 20 bp, Artificial Sequence
  Description of Artificial Sequence: Synthetic oligonucleotide
  Target: COL7A1; (-) strand; PAM type: YTN; PAM sequence: CTC
agctctgacctcttcttttc

SEQ ID NO: 26668 - DNA, 20 bp, Artificial Sequence
  Description of Artificial Sequence: Synthetic oligonucleotide
  Target: COL7A1; (-) strand; PAM type: YTN; PAM sequence: CTG
ggcccaactcagctctgacc

SEQ ID NO: 26669 - DNA, 20 bp, Artificial Sequence
  Description of Artificial Sequence: Synthetic oligonucleotide
  Target: COL7A1; (-) strand; PAM type: YTN; PAM sequence: CTG
gaggatctgggcccaactca

SEQ ID NO: 26670 - DNA, 20 bp, Artificial Sequence
  Description of Artificial Sequence: Synthetic oligonucleotide
  Target: COL7A1; (-) strand; PAM type: YTN; PAM sequence: CTG
gggggtgccaagggccctgg

SEQ ID NO: 26671 - DNA, 20 bp, Artificial Sequence
  Description of Artificial Sequence: Synthetic oligonucleotide
  Target: COL7A1; (-) strand; PAM type: YTN; PAM sequence: CTG
gagagaaggtaagtgcaacc

SEQ ID NO: 26672 - DNA, 20 bp, Artificial Sequence
  Description of Artificial Sequence: Synthetic oligonucleotide
  Target: COL7A1; (-) strand; PAM type: YTN; PAM sequence: CTG
ggtgaggctggagagaaggt

SEQ ID NO: 26673 - DNA, 20 bp, Artificial Sequence
  Description of Artificial Sequence: Synthetic oligonucleotide
  Target: COL7A1; (-) strand; PAM type: YTN; PAM sequence: TTC
cagggcccctgggtgaggct

SEQ ID NO: 26674 - DNA, 20 bp, Artificial Sequence
  Description of Artificial Sequence: Synthetic oligonucleotide
  Target: COL7A1; (-) strand; PAM type: YTN; PAM sequence: TTT
ccagggcccctgggtgaggc

SEQ ID NO: 26675 - DNA, 20 bp, Artificial Sequence
  Description of Artificial Sequence: Synthetic oligonucleotide
  Target: COL7A1; (-) strand; PAM type: YTN; PAM sequence: CTT
tccagggcccctgggtgagg

SEQ ID NO: 26676 - DNA, 20 bp, Artificial Sequence
  Description of Artificial Sequence: Synthetic oligonucleotide
  Target: COL7A1; (-) strand; PAM type: YTN; PAM sequence: TTC
agggtgaccggggctttcca

SEQ ID NO: 26677 - DNA, 20 bp, Artificial Sequence
  Description of Artificial Sequence: Synthetic oligonucleotide
  Target: COL7A1; (-) strand; PAM type: YTN; PAM sequence: CTT
cagggtgaccggggctttcc

SEQ ID NO: 26678 - DNA, 20 bp, Artificial Sequence
  Description of Artificial Sequence: Synthetic oligonucleotide
  Target: COL7A1; (-) strand; PAM type: YTN; PAM sequence: CTC
ttcagggtgaccggggcttt

SEQ ID NO: 26679 - DNA, 20 bp, Artificial Sequence
  Description of Artificial Sequence: Synthetic oligonucleotide
  Target: COL7A1; (-) strand; PAM type: YTN; PAM sequence: CTC
tcttcagggtgaccggggct

SEQ ID NO: 26680 - DNA, 20 bp, Artificial Sequence
  Description of Artificial Sequence: Synthetic oligonucleotide
  Target: COL7A1; (-) strand; PAM type: YTN; PAM sequence: CTC
tctcttcagggtgaccgggg

SEQ ID NO: 26681 - DNA, 20 bp, Artificial Sequence
  Description of Artificial Sequence: Synthetic oligonucleotide
  Target: COL7A1; (-) strand; PAM type: YTN; PAM sequence: CTC
accctctctcttcagggtga

SEQ ID NO: 26682 - DNA, 20 bp, Artificial Sequence
  Description of Artificial Sequence: Synthetic oligonucleotide
  Target: COL7A1; (-) strand; PAM type: YTN; PAM sequence: CTC
tcaccctctctcttcagggt

SEQ ID NO: 26683 - DNA, 20 bp, Artificial Sequence
  Description of Artificial Sequence: Synthetic oligonucleotide
  Target: COL7A1; (-) strand; PAM type: YTN; PAM sequence: TTC
tctcaccctctctcttcagg

SEQ ID NO: 26684 - DNA, 20 bp, Artificial Sequence
  Description of Artificial Sequence: Synthetic oligonucleotide
  Target: COL7A1; (-) strand; PAM type: YTN; PAM sequence: TTT
ctctcaccctctctcttcag

SEQ ID NO: 26685 - DNA, 20 bp, Artificial Sequence
  Description of Artificial Sequence: Synthetic oligonucleotide
  Target: COL7A1; (-) strand; PAM type: YTN; PAM sequence: CTT
tctctcaccctctctcttca

SEQ ID NO: 26686 - DNA, 20 bp, Artificial Sequence
  Description of Artificial Sequence: Synthetic oligonucleotide
  Target: COL7A1; (-) strand; PAM type: YTN; PAM sequence: CTG
tctttctctcaccctctctc

SEQ ID NO: 26687 - DNA, 20 bp, Artificial Sequence
  Description of Artificial Sequence: Synthetic oligonucleotide
  Target: COL7A1; (-) strand; PAM type: YTN; PAM sequence: CTC
tgtctttctctcaccctctc

SEQ ID NO: 26688 - DNA, 20 bp, Artificial Sequence
  Description of Artificial Sequence: Synthetic oligonucleotide
  Target: COL7A1; (-) strand; PAM type: YTN; PAM sequence: CTC
tctgtctttctctcaccctc

SEQ ID NO: 26689 - DNA, 20 bp, Artificial Sequence
  Description of Artificial Sequence: Synthetic oligonucleotide
  Target: COL7A1; (-) strand; PAM type: YTN; PAM sequence: CTC
tctctgtctttctctcaccc

SEQ ID NO: 26690 - DNA, 20 bp, Artificial Sequence
  Description of Artificial Sequence: Synthetic oligonucleotide
  Target: COL7A1; (-) strand; PAM type: YTN; PAM sequence: CTC
tctctctgtctttctctcac

SEQ ID NO: 26691 - DNA, 20 bp, Artificial Sequence
  Description of Artificial Sequence: Synthetic oligonucleotide
  Target: COL7A1; (-) strand; PAM type: YTN; PAM sequence: CTC
tctctctctgtctttctctc

SEQ ID NO: 26692 - DNA, 20 bp, Artificial Sequence
  Description of Artificial Sequence: Synthetic oligonucleotide
  Target: COL7A1; (-) strand; PAM type: YTN; PAM sequence: TTC
aagccccgccaccaaccctc

SEQ ID NO: 26693 - DNA, 20 bp, Artificial Sequence
  Description of Artificial Sequence: Synthetic oligonucleotide
  Target: COL7A1; (-) strand; PAM type: YTN; PAM sequence: TTG
acgttcaagccccgccacca

SEQ ID NO: 26694 - DNA, 20 bp, Artificial Sequence
  Description of Artificial Sequence: Synthetic oligonucleotide
  Target: COL7A1; (-) strand; PAM type: YTN; PAM sequence: TTT
gacgttcaagccccgccacc

SEQ ID NO: 26695 - DNA, 20 bp, Artificial Sequence
  Description of Artificial Sequence: Synthetic oligonucleotide
  Target: COL7A1; (-) strand; PAM type: YTN; PAM sequence: CTG
gggtttgacgttcaagcccc

SEQ ID NO: 26696 - DNA, 20 bp, Artificial Sequence
  Description of Artificial Sequence: Synthetic oligonucleotide
  Target: COL7A1; (-) strand; PAM type: YTN; PAM sequence: TTG
tctggggtttgacgttcaag

SEQ ID NO: 26697 - DNA, 20 bp, Artificial Sequence
  Description of Artificial Sequence: Synthetic oligonucleotide
  Target: COL7A1; (-) strand; PAM type: YTN; PAM sequence: CTT
gtctggggtttgacgttcaa

SEQ ID NO: 26698 - DNA, 20 bp, Artificial Sequence
  Description of Artificial Sequence: Synthetic oligonucleotide
  Target: COL7A1; (-) strand; PAM type: YTN; PAM sequence: TTG
ggaccccttgtctggggttt

SEQ ID NO: 26699 - DNA, 20 bp, Artificial Sequence
  Description of Artificial Sequence: Synthetic oligonucleotide
  Target: COL7A1; (-) strand; PAM type: YTN; PAM sequence: TTT
gggaccccttgtctggggtt

SEQ ID NO: 26700 - DNA, 20 bp, Artificial Sequence
  Description of Artificial Sequence: Synthetic oligonucleotide
  Target: COL7A1; (-) strand; PAM type: YTN; PAM sequence: TTG
gagtttgggaccccttgtct

SEQ ID NO: 26701 - DNA, 20 bp, Artificial Sequence
  Description of Artificial Sequence: Synthetic oligonucleotide
  Target: COL7A1; (-) strand; PAM type: YTN; PAM sequence: TTG
gagggggtggttggagtttg

SEQ ID NO: 26702 - DNA, 20 bp, Artificial Sequence
  Description of Artificial Sequence: Synthetic oligonucleotide
  Target: COL7A1; (-) strand; PAM type: YTN; PAM sequence: TTT
ggagggggtggttggagttt

SEQ ID NO: 26703 - DNA, 20 bp, Artificial Sequence
  Description of Artificial Sequence: Synthetic oligonucleotide
  Target: COL7A1; (-) strand; PAM type: YTN; PAM sequence: TTT
tggagggggtggttggagtt

SEQ ID NO: 26704 - DNA, 20 bp, Artificial Sequence
  Description of Artificial Sequence: Synthetic oligonucleotide
  Target: COL7A1; (-) strand; PAM type: YTN; PAM sequence: CTC
caggtcagaggtcgtggttt

SEQ ID NO: 26705 - DNA, 20 bp, Artificial Sequence
  Description of Artificial Sequence: Synthetic oligonucleotide
  Target: COL7A1; (-) strand; PAM type: YTN; PAM sequence: TTC
cctccaggtcagaggtcgtg

SEQ ID NO: 26706 - DNA, 20 bp, Artificial Sequence
  Description of Artificial Sequence: Synthetic oligonucleotide
  Target: COL7A1; (-) strand; PAM type: YTN; PAM sequence: CTG
gaagataaggagataagagt

SEQ ID NO: 26707 - DNA, 20 bp, Artificial Sequence
  Description of Artificial Sequence: Synthetic oligonucleotide
  Target: COL7A1; (-) strand; PAM type: YTN; PAM sequence: TTA
ggggaggctggaagataagg

SEQ ID NO: 26708 - DNA, 20 bp, Artificial Sequence
  Description of Artificial Sequence: Synthetic oligonucleotide
  Target: COL7A1; (-) strand; PAM type: YTN; PAM sequence: CTC
cccatggtgttaggggaggc

SEQ ID NO: 26709 - DNA, 20 bp, Artificial Sequence
  Description of Artificial Sequence: Synthetic oligonucleotide
  Target: COL7A1; (-) strand; PAM type: YTN; PAM sequence: CTG
ggctccccatggtgttaggg

SEQ ID NO: 26710 - DNA, 20 bp, Artificial Sequence
  Description of Artificial Sequence: Synthetic oligonucleotide
  Target: COL7A1; (-) strand; PAM type: YTN; PAM sequence: CTC
tgggctccccatggtgttag

SEQ ID NO: 26711 - DNA, 20 bp, Artificial Sequence
  Description of Artificial Sequence: Synthetic oligonucleotide
  Target: COL7A1; (-) strand; PAM type: YTN; PAM sequence: CTA
ctctgggctccccatggtgt

SEQ ID NO: 26712 - DNA, 20 bp, Artificial Sequence
  Description of Artificial Sequence: Synthetic oligonucleotide
  Target: COL7A1; (-) strand; PAM type: YTN; PAM sequence: TTC
aggtgtgaggggtgctactc

SEQ ID NO: 26713 - DNA, 20 bp, Artificial Sequence
  Description of Artificial Sequence: Synthetic oligonucleotide
  Target: COL7A1; (-) strand; PAM type: YTN; PAM sequence: TTG
ggggattcaggtgtgagggg

SEQ ID NO: 26714 - DNA, 20 bp, Artificial Sequence
  Description of Artificial Sequence: Synthetic oligonucleotide
  Target: COL7A1; (-) strand; PAM type: YTN; PAM sequence: TTG
gccccaaagtgagtaccagt

SEQ ID NO: 26715 - DNA, 20 bp, Artificial Sequence
  Description of Artificial Sequence: Synthetic oligonucleotide
  Target: COL7A1; (-) strand; PAM type: YTN; PAM sequence: CTA
ttggccccaaagtgagtacc

SEQ ID NO: 26716 - DNA, 20 bp, Artificial Sequence
  Description of Artificial Sequence: Synthetic oligonucleotide
  Target: COL7A1; (-) strand; PAM type: YTN; PAM sequence: CTG
gagctattggccccaaagtg

SEQ ID NO: 26717 - DNA, 20 bp, Artificial Sequence
  Description of Artificial Sequence: Synthetic oligonucleotide
  Target: COL7A1; (-) strand; PAM type: YTN; PAM sequence: CTC
ctggagctattggccccaaa

SEQ ID NO: 26718 - DNA, 20 bp, Artificial Sequence
  Description of Artificial Sequence: Synthetic oligonucleotide
  Target: COL7A1; (-) strand; PAM type: YTN; PAM sequence: TTC
cagggcccacggggacctcc

SEQ ID NO: 26719 - DNA, 20 bp, Artificial Sequence
  Description of Artificial Sequence: Synthetic oligonucleotide
  Target: COL7A1; (-) strand; PAM type: YTN; PAM sequence: CTT
ccagggcccacggggacctc

SEQ ID NO: 26720 - DNA, 20 bp, Artificial Sequence
  Description of Artificial Sequence: Synthetic oligonucleotide
  Target: COL7A1; (-) strand; PAM type: YTN; PAM sequence: TTC
atcccttccagggcccacgg

SEQ ID NO: 26721 - DNA, 20 bp, Artificial Sequence
  Description of Artificial Sequence: Synthetic oligonucleotide
  Target: COL7A1; (-) strand; PAM type: YTN; PAM sequence: CTG
aacccccaaattcatccctt

SEQ ID NO: 26722 - DNA, 20 bp, Artificial Sequence
  Description of Artificial Sequence: Synthetic oligonucleotide
  Target: COL7A1; (-) strand; PAM type: YTN; PAM sequence: CTC
tgaacccccaaattcatccc

SEQ ID NO: 26723 - DNA, 20 bp, Artificial Sequence
  Description of Artificial Sequence: Synthetic oligonucleotide
  Target: COL7A1; (-) strand; PAM type: YTN; PAM sequence: CTC
atgcccaaacccaaatctct

SEQ ID NO: 26724 - DNA, 20 bp, Artificial Sequence
  Description of Artificial Sequence: Synthetic oligonucleotide
  Target: COL7A1; (-) strand; PAM type: YTN; PAM sequence: CTC
catcctcatgcccaaaccca

SEQ ID NO: 26725 - DNA, 20 bp, Artificial Sequence
  Description of Artificial Sequence: Synthetic oligonucleotide
  Target: COL7A1; (-) strand; PAM type: YTN; PAM sequence: CTG
ctccatcctcatgcccaaac

SEQ ID NO: 26726 - DNA, 20 bp, Artificial Sequence
  Description of Artificial Sequence: Synthetic oligonucleotide
  Target: COL7A1; (-) strand; PAM type: YTN; PAM sequence: CTC
aatcatcaaccactgctcca

SEQ ID NO: 26727 - DNA, 20 bp, Artificial Sequence
  Description of Artificial Sequence: Synthetic oligonucleotide
  Target: COL7A1; (-) strand; PAM type: YTN; PAM sequence: CTA
cctcaatcatcaaccactgc

SEQ ID NO: 26728 - DNA, 20 bp, Artificial Sequence
  Description of Artificial Sequence: Synthetic oligonucleotide
  Target: COL7A1; (-) strand; PAM type: YTN; PAM sequence: CTC
cagcccctacctcaatcatc

SEQ ID NO: 26729 - DNA, 20 bp, Artificial Sequence
  Description of Artificial Sequence: Synthetic oligonucleotide
  Target: COL7A1; (-) strand; PAM type: YTN; PAM sequence: CTG
aatatggtgggcacagctcc

SEQ ID NO: 26730 - DNA, 20 bp, Artificial Sequence
  Description of Artificial Sequence: Synthetic oligonucleotide
  Target: COL7A1; (-) strand; PAM type: YTN; PAM sequence: TTC
tgaatatggtgggcacagct

SEQ ID NO: 26731 - DNA, 20 bp, Artificial Sequence
  Description of Artificial Sequence: Synthetic oligonucleotide
  Target: COL7A1; (-) strand; PAM type: YTN; PAM sequence: CTC
cgggtgagcaggtgagtgga

SEQ ID NO: 26732 - DNA, 20 bp, Artificial Sequence
  Description of Artificial Sequence: Synthetic oligonucleotide
  Target: COL7A1; (-) strand; PAM type: YTN; PAM sequence: CTG
ggtctccgggtgagcaggtg

SEQ ID NO: 26733 - DNA, 20 bp, Artificial Sequence
  Description of Artificial Sequence: Synthetic oligonucleotide
  Target: COL7A1; (-) strand; PAM type: YTN; PAM sequence: CTC
ccaggacaacctgggtctcc

SEQ ID NO: 26734 - DNA, 20 bp, Artificial Sequence
  Description of Artificial Sequence: Synthetic oligonucleotide
  Target: COL7A1; (-) strand; PAM type: YTN; PAM sequence: CTC
caggcctcccaggacaacct

SEQ ID NO: 26735 - DNA, 20 bp, Artificial Sequence
  Description of Artificial Sequence: Synthetic oligonucleotide
  Target: COL7A1; (-) strand; PAM type: YTN; PAM sequence: CTG
aggatggagctccaggcctc

SEQ ID NO: 26736 - DNA, 20 bp, Artificial Sequence
  Description of Artificial Sequence: Synthetic oligonucleotide
  Target: COL7A1; (-) strand; PAM type: YTN; PAM sequence: CTC
tgaggatggagctccaggcc

SEQ ID NO: 26737 - DNA, 20 bp, Artificial Sequence
  Description of Artificial Sequence: Synthetic oligonucleotide
  Target: COL7A1; (-) strand; PAM type: YTN; PAM sequence: TTC
agggtgactctgaggatgga

SEQ ID NO: 26738 - DNA, 20 bp, Artificial Sequence
  Description of Artificial Sequence: Synthetic oligonucleotide
  Target: COL7A1; (-) strand; PAM type: YTN; PAM sequence: CTT
cagggtgactctgaggatgg

SEQ ID NO: 26739 - DNA, 20 bp, Artificial Sequence
  Description of Artificial Sequence: Synthetic oligonucleotide
  Target: COL7A1; (-) strand; PAM type: YTN; PAM sequence: CTC
cttcagggtgactctgagga

SEQ ID NO: 26740 - DNA, 20 bp, Artificial Sequence
  Description of Artificial Sequence: Synthetic oligonucleotide
  Target: COL7A1; (-) strand; PAM type: YTN; PAM sequence: TTC
tccttcagggtgactctgag

SEQ ID NO: 26741 - DNA, 20 bp, Artificial Sequence
  Description of Artificial Sequence: Synthetic oligonucleotide
  Target: COL7A1; (-) strand; PAM type: YTN; PAM sequence: TTT
ctccttcagggtgactctga

SEQ ID NO: 26742 - DNA, 20 bp, Artificial Sequence
  Description of Artificial Sequence: Synthetic oligonucleotide
  Target: COL7A1; (-) strand; PAM type: YTN; PAM sequence: TTC
ccacccgtgtgtttctcctt

SEQ ID NO: 26743 - DNA, 20 bp, Artificial Sequence
  Description of Artificial Sequence: Synthetic oligonucleotide
  Target: COL7A1; (-) strand; PAM type: YTN; PAM sequence: CTT
cccacccgtgtgtttctcct

SEQ ID NO: 26744 - DNA, 20 bp, Artificial Sequence
  Description of Artificial Sequence: Synthetic oligonucleotide
  Target: COL7A1; (-) strand; PAM type: YTN; PAM sequence: TTC
ggtcttcccacccgtgtgtt

SEQ ID NO: 26745 - DNA, 20 bp, Artificial Sequence
  Description of Artificial Sequence: Synthetic oligonucleotide
  Target: COL7A1; (-) strand; PAM type: YTN; PAM sequence: CTT
cggtcttcccacccgtgtgt

SEQ ID NO: 26746 - DNA, 20 bp, Artificial Sequence
  Description of Artificial Sequence: Synthetic oligonucleotide
  Target: COL7A1; (-) strand; PAM type: YTN; PAM sequence: CTC
ccttcggtcttcccacccgt

SEQ ID NO: 26747 - DNA, 20 bp, Artificial Sequence
  Description of Artificial Sequence: Synthetic oligonucleotide
  Target: COL7A1; (-) strand; PAM type: YTN; PAM sequence: CTG
ggggcagggcctcccttcgg

SEQ ID NO: 26748 - DNA, 20 bp, Artificial Sequence
  Description of Artificial Sequence: Synthetic oligonucleotide
  Target: COL7A1; (-) strand; PAM type: YTN; PAM sequence: CTG
cgtgctgggggcagggcctc

SEQ ID NO: 26749 - DNA, 20 bp, Artificial Sequence
  Description of Artificial Sequence: Synthetic oligonucleotide
  Target: COL7A1; (-) strand; PAM type: YTN; PAM sequence: CTG
gggtgggaggctgcgtgctg

SEQ ID NO: 26750 - DNA, 20 bp, Artificial Sequence
  Description of Artificial Sequence: Synthetic oligonucleotide
  Target: COL7A1; (-) strand; PAM type: YTN; PAM sequence: TTC
tggggtgggaggctgcgtgc

SEQ ID NO: 26751 - DNA, 20 bp, Artificial Sequence
  Description of Artificial Sequence: Synthetic oligonucleotide
  Target: COL7A1; (-) strand; PAM type: YTN; PAM sequence: TTG
atgatgtcccagttctgggg

SEQ ID NO: 26752 - DNA, 20 bp, Artificial Sequence
  Description of Artificial Sequence: Synthetic oligonucleotide
  Target: COL7A1; (-) strand; PAM type: YTN; PAM sequence: CTT
gatgatgtcccagttctggg

SEQ ID NO: 26753 - DNA, 20 bp, Artificial Sequence
  Description of Artificial Sequence: Synthetic oligonucleotide
  Target: COL7A1; (-) strand; PAM type: YTN; PAM sequence: CTG
acttgatgatgtcccagttc

SEQ ID NO: 26754 - DNA, 20 bp, Artificial Sequence
  Description of Artificial Sequence: Synthetic oligonucleotide
  Target: COL7A1; (-) strand; PAM type: YTN; PAM sequence: CTG
gaaagaaaggagaaaaagta

SEQ ID NO: 26755 - DNA, 20 bp, Artificial Sequence
  Description of Artificial Sequence: Synthetic oligonucleotide
  Target: COL7A1; (-) strand; PAM type: YTN; PAM sequence: TTG
gcccccctggaaagaaagga

SEQ ID NO: 26756 - DNA, 20 bp, Artificial Sequence
  Description of Artificial Sequence: Synthetic oligonucleotide
  Target: COL7A1; (-) strand; PAM type: YTN; PAM sequence: CTG
gaccccaaggccccgttggc

SEQ ID NO: 26757 - DNA, 20 bp, Artificial Sequence
  Description of Artificial Sequence: Synthetic oligonucleotide
  Target: COL7A1; (-) strand; PAM type: YTN; PAM sequence: TTC
ccggaagccctggaccccaa

SEQ ID NO: 26758 - DNA, 20 bp, Artificial Sequence
  Description of Artificial Sequence: Synthetic oligonucleotide
  Target: COL7A1; (-) strand; PAM type: YTN; PAM sequence: CTT
cccggaagccctggacccca

SEQ ID NO: 26759 - DNA, 20 bp, Artificial Sequence
  Description of Artificial Sequence: Synthetic oligonucleotide
  Target: COL7A1; (-) strand; PAM type: YTN; PAM sequence: CTA
gggtcttcccggaagccctg

SEQ ID NO: 26760 - DNA, 20 bp, Artificial Sequence
  Description of Artificial Sequence: Synthetic oligonucleotide
  Target: COL7A1; (-) strand; PAM type: YTN; PAM sequence: TTC
ctagggtcttcccggaagcc

SEQ ID NO: 26761 - DNA, 20 bp, Artificial Sequence
  Description of Artificial Sequence: Synthetic oligonucleotide
  Target: COL7A1; (-) strand; PAM type: YTN; PAM sequence: CTT
cctagggtcttcccggaagc

SEQ ID NO: 26762 - DNA, 20 bp, Artificial Sequence
  Description of Artificial Sequence: Synthetic oligonucleotide
  Target: COL7A1; (-) strand; PAM type: YTN; PAM sequence: TTC
ttcctagggtcttcccggaa

SEQ ID NO: 26763 - DNA, 20 bp, Artificial Sequence
  Description of Artificial Sequence: Synthetic oligonucleotide
  Target: COL7A1; (-) strand; PAM type: YTN; PAM sequence: CTT
cttcctagggtcttcccgga

SEQ ID NO: 26764 - DNA, 20 bp, Artificial Sequence
  Description of Artificial Sequence: Synthetic oligonucleotide
  Target: COL7A1; (-) strand; PAM type: YTN; PAM sequence: CTC
acttcttcctagggtcttcc

SEQ ID NO: 26765 - DNA, 20 bp, Artificial Sequence
  Description of Artificial Sequence: Synthetic oligonucleotide
  Target: COL7A1; (-) strand; PAM type: YTN; PAM sequence: TTA
ctcacttcttcctagggtct

SEQ ID NO: 26766 - DNA, 20 bp, Artificial Sequence
  Description of Artificial Sequence: Synthetic oligonucleotide
  Target: COL7A1; (-) strand; PAM type: YTN; PAM sequence: TTT
actcacttcttcctagggtc

SEQ ID NO: 26767 - DNA, 20 bp, Artificial Sequence
  Description of Artificial Sequence: Synthetic oligonucleotide
  Target: COL7A1; (-) strand; PAM type: YTN; PAM sequence: TTT
tactcacttcttcctagggt

SEQ ID NO: 26768 - DNA, 20 bp, Artificial Sequence
  Description of Artificial Sequence: Synthetic oligonucleotide
  Target: COL7A1; (-) strand; PAM type: YTN; PAM sequence: TTT
ttactcacttcttcctaggg

SEQ ID NO: 26769 - DNA, 20 bp, Artificial Sequence
  Description of Artificial Sequence: Synthetic oligonucleotide
  Target: COL7A1; (-) strand; PAM type: YTN; PAM sequence: CTC
atatttttactcacttcttc

SEQ ID NO: 26770 - DNA, 20 bp, Artificial Sequence
  Description of Artificial Sequence: Synthetic oligonucleotide
  Target: COL7A1; (-) strand; PAM type: YTN; PAM sequence: TTG
gctcatatttttactcactt

SEQ ID NO: 26771 - DNA, 20 bp, Artificial Sequence
  Description of Artificial Sequence: Synthetic oligonucleotide
  Target: COL7A1; (-) strand; PAM type: YTN; PAM sequence: CTT
ggctcatatttttactcact

SEQ ID NO: 26772 - DNA, 20 bp, Artificial Sequence
  Description of Artificial Sequence: Synthetic oligonucleotide
  Target: COL7A1; (-) strand; PAM type: YTN; PAM sequence: TTC
ttggctcatatttttactca

SEQ ID NO: 26773 - DNA, 20 bp, Artificial Sequence
  Description of Artificial Sequence: Synthetic oligonucleotide
  Target: COL7A1; (-) strand; PAM type: YTN; PAM sequence: TTC
atagttcttggctcatattt

SEQ ID NO: 26774 - DNA, 20 bp, Artificial Sequence
  Description of Artificial Sequence: Synthetic oligonucleotide
  Target: COL7A1; (-) strand; PAM type: YTN; PAM sequence: CTT
catagttcttggctcatatt

SEQ ID NO: 26775 - DNA, 20 bp, Artificial Sequence
  Description of Artificial Sequence: Synthetic oligonucleotide
  Target: COL7A1; (-) strand; PAM type: YTN; PAM sequence: CTG
ggcttcatagttcttggctc

SEQ ID NO: 26776 - DNA, 20 bp, Artificial Sequence
  Description of Artificial Sequence: Synthetic oligonucleotide
  Target: COL7A1; (-) strand; PAM type: YTN; PAM sequence: TTG
ggtgctgggcttcatagttc

SEQ ID NO: 26777 - DNA, 20 bp, Artificial Sequence
  Description of Artificial Sequence: Synthetic oligonucleotide
  Target: COL7A1; (-) strand; PAM type: YTN; PAM sequence: CTG
gggcagtggttgggtgctgg

SEQ ID NO: 26778 - DNA, 20 bp, Artificial Sequence
  Description of Artificial Sequence: Synthetic oligonucleotide
  Target: COL7A1; (-) strand; PAM type: YTN; PAM sequence: CTC
ctggggcagtggttgggtgc

SEQ ID NO: 26779 - DNA, 20 bp, Artificial Sequence
  Description of Artificial Sequence: Synthetic oligonucleotide
  Target: COL7A1; (-) strand; PAM type: YTN; PAM sequence: CTC
tcctggggcagtggttgggt

SEQ ID NO: 26780 - DNA, 20 bp, Artificial Sequence
  Description of Artificial Sequence: Synthetic oligonucleotide
  Target: COL7A1; (-) strand; PAM type: YTN; PAM sequence: CTC
aggggtgtgggtctctcctg

SEQ ID NO: 26781 - DNA, 20 bp, Artificial Sequence
  Description of Artificial Sequence: Synthetic oligonucleotide
  Target: COL7A1; (-) strand; PAM type: YTN; PAM sequence: CTG
ctcaggggtgtgggtctctc

SEQ ID NO: 26782 - DNA, 20 bp, Artificial Sequence
  Description of Artificial Sequence: Synthetic oligonucleotide
  Target: COL7A1; (-) strand; PAM type: YTN; PAM sequence: CTG
ggggccctgctcaggggtgt

SEQ ID NO: 26783 - DNA, 20 bp, Artificial Sequence
  Description of Artificial Sequence: Synthetic oligonucleotide
  Target: COL7A1; (-) strand; PAM type: YTN; PAM sequence: CTG
ctgggggccctgctcagggg

SEQ ID NO: 26784 - DNA, 20 bp, Artificial Sequence
  Description of Artificial Sequence: Synthetic oligonucleotide
  Target: COL7A1; (-) strand; PAM type: YTN; PAM sequence: CTC
tgctgggggccctgctcagg

SEQ ID NO: 26785 - DNA, 20 bp, Artificial Sequence
  Description of Artificial Sequence: Synthetic oligonucleotide
  Target: COL7A1; (-) strand; PAM type: YTN; PAM sequence: TTG
aggctctgctgggggccctg

SEQ ID NO: 26786 - DNA, 20 bp, Artificial Sequence
  Description of Artificial Sequence: Synthetic oligonucleotide
  Target: COL7A1; (-) strand; PAM type: YTN; PAM sequence: CTT
gaggctctgctgggggccct

SEQ ID NO: 26787 - DNA, 20 bp, Artificial Sequence
  Description of Artificial Sequence: Synthetic oligonucleotide
  Target: COL7A1; (-) strand; PAM type: YTN; PAM sequence: CTG
ccggtgaggggccttgaggc

SEQ ID NO: 26788 - DNA, 20 bp, Artificial Sequence
  Description of Artificial Sequence: Synthetic oligonucleotide
  Target: COL7A1; (-) strand; PAM type: YTN; PAM sequence: CTG
ggctgccggtgaggggcctt

SEQ ID NO: 26789 - DNA, 20 bp, Artificial Sequence
  Description of Artificial Sequence: Synthetic oligonucleotide
  Target: COL7A1; (-) strand; PAM type: YTN; PAM sequence: CTG
gggagcctgggctgccggtg

SEQ ID NO: 26790 - DNA, 20 bp, Artificial Sequence
  Description of Artificial Sequence: Synthetic oligonucleotide
  Target: COL7A1; (-) strand; PAM type: YTN; PAM sequence: CTC
ctggggagcctgggctgccg

SEQ ID NO: 26791 - DNA, 20 bp, Artificial Sequence
  Description of Artificial Sequence: Synthetic oligonucleotide
  Target: COL7A1; (-) strand; PAM type: YTN; PAM sequence: TTG
ctcctggggagcctgggctg

SEQ ID NO: 26792 - DNA, 20 bp, Artificial Sequence
  Description of Artificial Sequence: Synthetic oligonucleotide
  Target: COL7A1; (-) strand; PAM type: YTN; PAM sequence: CTG
gaccaggtgaaggtggcatt

SEQ ID NO: 26793 - DNA, 20 bp, Artificial Sequence
  Description of Artificial Sequence: Synthetic oligonucleotide
  Target: COL7A1; (-) strand; PAM type: YTN; PAM sequence: CTC
ccagggtccccctggaccag

SEQ ID NO: 26794 - DNA, 20 bp, Artificial Sequence
  Description of Artificial Sequence: Synthetic oligonucleotide
  Target: COL7A1; (-) strand; PAM type: YTN; PAM sequence: CTC
tcccagggtccccctggacc

SEQ ID NO: 26795 - DNA, 20 bp, Artificial Sequence
  Description of Artificial Sequence: Synthetic oligonucleotide
  Target: COL7A1; (-) strand; PAM type: YTN; PAM sequence: TTC
tctcccagggtccccctgga

SEQ ID NO: 26796 - DNA, 20 bp, Artificial Sequence
  Description of Artificial Sequence: Synthetic oligonucleotide
  Target: COL7A1; (-) strand; PAM type: YTN; PAM sequence: CTG
ttctctcccagggtccccct

SEQ ID NO: 26797 - DNA, 20 bp, Artificial Sequence
  Description of Artificial Sequence: Synthetic oligonucleotide
  Target: COL7A1; (-) strand; PAM type: YTN; PAM sequence: CTG
ctgttctctcccagggtccc

SEQ ID NO: 26798 - DNA, 20 bp, Artificial Sequence
  Description of Artificial Sequence: Synthetic oligonucleotide
  Target: COL7A1; (-) strand; PAM type: YTN; PAM sequence: CTG
acctgctgttctctcccagg

SEQ ID NO: 26799 - DNA, 20 bp, Artificial Sequence
  Description of Artificial Sequence: Synthetic oligonucleotide
  Target: COL7A1; (-) strand; PAM type: YTN; PAM sequence: TTC
cctgacctgctgttctctcc

SEQ ID NO: 26800 - DNA, 20 bp, Artificial Sequence
  Description of Artificial Sequence: Synthetic oligonucleotide
  Target: COL7A1; (-) strand; PAM type: YTN; PAM sequence: TTC
attccctgacctgctgttct

SEQ ID NO: 26801 - DNA, 20 bp, Artificial Sequence
  Description of Artificial Sequence: Synthetic oligonucleotide
  Target: COL7A1; (-) strand; PAM type: YTN; PAM sequence: CTG
ttcattccctgacctgctgt

SEQ ID NO: 26802 - DNA, 20 bp, Artificial Sequence
  Description of Artificial Sequence: Synthetic oligonucleotide
  Target: COL7A1; (-) strand; PAM type: YTN; PAM sequence: TTC
ccctgttcattccctgacct

SEQ ID NO: 26803 - DNA, 20 bp, Artificial Sequence
  Description of Artificial Sequence: Synthetic oligonucleotide
  Target: COL7A1; (-) strand; PAM type: YTN; PAM sequence: CTG
attcccctgttcattccctg

SEQ ID NO: 26804 - DNA, 20 bp, Artificial Sequence
  Description of Artificial Sequence: Synthetic oligonucleotide
  Target: COL7A1; (-) strand; PAM type: YTN; PAM sequence: TTG
gagtctgattcccctgttca

SEQ ID NO: 26805 - DNA, 20 bp, Artificial Sequence
  Description of Artificial Sequence: Synthetic oligonucleotide
  Target: COL7A1; (-) strand; PAM type: YTN; PAM sequence: CTT
ggagtctgattcccctgttc

SEQ ID NO: 26806 - DNA, 20 bp, Artificial Sequence
  Description of Artificial Sequence: Synthetic oligonucleotide
  Target: COL7A1; (-) strand; PAM type: YTN; PAM sequence: CTA
ggggtggcttggagtctgat

SEQ ID NO: 26807 - DNA, 20 bp, Artificial Sequence
  Description of Artificial Sequence: Synthetic oligonucleotide
  Target: COL7A1; (-) strand; PAM type: YTN; PAM sequence: TTG
tgctaggggtggcttggagt

SEQ ID NO: 26808 - DNA, 20 bp, Artificial Sequence
  Description of Artificial Sequence: Synthetic oligonucleotide
  Target: COL7A1; (-) strand; PAM type: YTN; PAM sequence: CTA
gggtgacaaaggcgatcgtg

SEQ ID NO: 26809 - DNA, 20 bp, Artificial Sequence
  Description of Artificial Sequence: Synthetic oligonucleotide
  Target: COL7A1; (-) strand; PAM type: YTN; PAM sequence: TTC
tagggtgacaaaggcgatcg

SEQ ID NO: 26810 - DNA, 20 bp, Artificial Sequence
  Description of Artificial Sequence: Synthetic oligonucleotide
  Target: COL7A1; (-) strand; PAM type: YTN; PAM sequence: TTT
ctagggtgacaaaggcgatc

SEQ ID NO: 26811 - DNA, 20 bp, Artificial Sequence
  Description of Artificial Sequence: Synthetic oligonucleotide
  Target: COL7A1; (-) strand; PAM type: YTN; PAM sequence: TTT
tctagggtgacaaaggcgat

SEQ ID NO: 26812 - DNA, 20 bp, Artificial Sequence
  Description of Artificial Sequence: Synthetic oligonucleotide
  Target: COL7A1; (-) strand; PAM type: YTN; PAM sequence: CTG
ttttctagggtgacaaaggc

SEQ ID NO: 26813 - DNA, 20 bp, Artificial Sequence
  Description of Artificial Sequence: Synthetic oligonucleotide
  Target: COL7A1; (-) strand; PAM type: YTN; PAM sequence: TTG
ggagtgaggtgtggcccagg

SEQ ID NO: 26814 - DNA, 20 bp, Artificial Sequence
  Description of Artificial Sequence: Synthetic oligonucleotide
  Target: COL7A1; (-) strand; PAM type: YTN; PAM sequence: TTT
gggagtgaggtgtggcccag

SEQ ID NO: 26815 - DNA, 20 bp, Artificial Sequence
  Description of Artificial Sequence: Synthetic oligonucleotide
  Target: COL7A1; (-) strand; PAM type: YTN; PAM sequence: CTT
tgggagtgaggtgtggccca

SEQ ID NO: 26816 - DNA, 20 bp, Artificial Sequence
  Description of Artificial Sequence: Synthetic oligonucleotide
  Target: COL7A1; (-) strand; PAM type: YTN; PAM sequence: CTG
gtatctttgggagtgaggtg

SEQ ID NO: 26817 - DNA, 20 bp, Artificial Sequence
  Description of Artificial Sequence: Synthetic oligonucleotide
  Target: COL7A1; (-) strand; PAM type: YTN; PAM sequence: CTC
ctggtatctttgggagtgag

SEQ ID NO: 26818 - DNA, 20 bp, Artificial Sequence
  Description of Artificial Sequence: Synthetic oligonucleotide
  Target: COL7A1; (-) strand; PAM type: YTN; PAM sequence: CTC
atcactcctggtatctttgg

SEQ ID NO: 26819 - DNA, 20 bp, Artificial Sequence
  Description of Artificial Sequence: Synthetic oligonucleotide
  Target: COL7A1; (-) strand; PAM type: YTN; PAM sequence: TTG
gaccccatgaccctcatcac

SEQ ID NO: 26820 - DNA, 20 bp, Artificial Sequence
  Description of Artificial Sequence: Synthetic oligonucleotide
  Target: COL7A1; (-) strand; PAM type: YTN; PAM sequence: TTG
aaatccaattggaccccatg

SEQ ID NO: 26821 - DNA, 20 bp, Artificial Sequence
  Description of Artificial Sequence: Synthetic oligonucleotide
  Target: COL7A1; (-) strand; PAM type: YTN; PAM sequence: CTT
gaaatccaattggaccccat

SEQ ID NO: 26822 - DNA, 20 bp, Artificial Sequence
  Description of Artificial Sequence: Synthetic oligonucleotide
  Target: COL7A1; (-) strand; PAM type: YTN; PAM sequence: CTC
ccaaaatccttgaaatccaa

SEQ ID NO: 26823 - DNA, 20 bp, Artificial Sequence
  Description of Artificial Sequence: Synthetic oligonucleotide
  Target: COL7A1; (-) strand; PAM type: YTN; PAM sequence: TTC
tcccaaaatccttgaaatcc

SEQ ID NO: 26824 - DNA, 20 bp, Artificial Sequence
  Description of Artificial Sequence: Synthetic oligonucleotide
  Target: COL7A1; (-) strand; PAM type: YTN; PAM sequence: CTC
agttctcccaaaatccttga

SEQ ID NO: 26825 - DNA, 20 bp, Artificial Sequence
  Description of Artificial Sequence: Synthetic oligonucleotide
  Target: COL7A1; (-) strand; PAM type: YTN; PAM sequence: CTC
accatgacgcctcagttctc

SEQ ID NO: 26826 - DNA, 20 bp, Artificial Sequence
  Description of Artificial Sequence: Synthetic oligonucleotide
  Target: COL7A1; (-) strand; PAM type: YTN; PAM sequence: TTA
cccccatcctcaccatgacg

SEQ ID NO: 26827 - DNA, 20 bp, Artificial Sequence
  Description of Artificial Sequence: Synthetic oligonucleotide
  Target: COL7A1; (-) strand; PAM type: YTN; PAM sequence: TTG
attacccccatcctcaccat

SEQ ID NO: 26828 - DNA, 20 bp, Artificial Sequence
  Description of Artificial Sequence: Synthetic oligonucleotide
  Target: COL7A1; (-) strand; PAM type: YTN; PAM sequence: TTT
gattacccccatcctcacca

SEQ ID NO: 26829 - DNA, 20 bp, Artificial Sequence
  Description of Artificial Sequence: Synthetic oligonucleotide
  Target: COL7A1; (-) strand; PAM type: YTN; PAM sequence: CTT
tgattacccccatcctcacc

SEQ ID NO: 26830 - DNA, 20 bp, Artificial Sequence
  Description of Artificial Sequence: Synthetic oligonucleotide
  Target: COL7A1; (-) strand; PAM type: YTN; PAM sequence: TTG
tgaccctttgattaccccca

SEQ ID NO: 26831 - DNA, 20 bp, Artificial Sequence
  Description of Artificial Sequence: Synthetic oligonucleotide
  Target: COL7A1; (-) strand; PAM type: YTN; PAM sequence: CTT
gtgaccctttgattaccccc

SEQ ID NO: 26832 - DNA, 20 bp, Artificial Sequence
  Description of Artificial Sequence: Synthetic oligonucleotide
  Target: COL7A1; (-) strand; PAM type: YTN; PAM sequence: CTG
gcccttgtgaccctttgatt

SEQ ID NO: 26833 - DNA, 20 bp, Artificial Sequence
  Description of Artificial Sequence: Synthetic oligonucleotide
  Target: COL7A1; (-) strand; PAM type: YTN; PAM sequence: CTC
tggcccttgtgaccctttga

SEQ ID NO: 26834 - DNA, 20 bp, Artificial Sequence
  Description of Artificial Sequence: Synthetic oligonucleotide
  Target: COL7A1; (-) strand; PAM type: YTN; PAM sequence: TTA
ctctggcccttgtgaccctt

SEQ ID NO: 26835 - DNA, 20 bp, Artificial Sequence
  Description of Artificial Sequence: Synthetic oligonucleotide
  Target: COL7A1; (-) strand; PAM type: YTN; PAM sequence: CTG
ccagttactctggcccttgt

SEQ ID NO: 26836 - DNA, 20 bp, Artificial Sequence
  Description of Artificial Sequence: Synthetic oligonucleotide
  Target: COL7A1; (-) strand; PAM type: YTN; PAM sequence: TTG
aacccacataacccctgcca

SEQ ID NO: 26837 - DNA, 20 bp, Artificial Sequence
  Description of Artificial Sequence: Synthetic oligonucleotide
  Target: COL7A1; (-) strand; PAM type: YTN; PAM sequence: TTT
gaacccacataacccctgcc

SEQ ID NO: 26838 - DNA, 20 bp, Artificial Sequence
  Description of Artificial Sequence: Synthetic oligonucleotide
  Target: COL7A1; (-) strand; PAM type: YTN; PAM sequence: CTG
gtgaccccatttgaacccac

SEQ ID NO: 26839 - DNA, 20 bp, Artificial Sequence
  Description of Artificial Sequence: Synthetic oligonucleotide
  Target: COL7A1; (-) strand; PAM type: YTN; PAM sequence: CTC
atgagtgccatgtgatgcag

SEQ ID NO: 26840 - DNA, 20 bp, Artificial Sequence
  Description of Artificial Sequence: Synthetic oligonucleotide
  Target: COL7A1; (-) strand; PAM type: YTN; PAM sequence: CTG
gaacagccatgaaggtgaca

SEQ ID NO: 26841 - DNA, 20 bp, Artificial Sequence
  Description of Artificial Sequence: Synthetic oligonucleotide
  Target: COL7A1; (-) strand; PAM type: YTN; PAM sequence: TTC
ctggaacagccatgaaggtg

SEQ ID NO: 26842 - DNA, 20 bp, Artificial Sequence
  Description of Artificial Sequence: Synthetic oligonucleotide
  Target: COL7A1; (-) strand; PAM type: YTN; PAM sequence: CTT
cctggaacagccatgaaggt

SEQ ID NO: 26843 - DNA, 20 bp, Artificial Sequence
  Description of Artificial Sequence: Synthetic oligonucleotide
  Target: COL7A1; (-) strand; PAM type: YTN; PAM sequence: CTG
ggggacccaggaccccgtgg

SEQ ID NO: 26844 - DNA, 20 bp, Artificial Sequence
  Description of Artificial Sequence: Synthetic oligonucleotide
  Target: COL7A1; (-) strand; PAM type: YTN; PAM sequence: CTC
gtggaccactgggggaccca

SEQ ID NO: 26845 - DNA, 20 bp, Artificial Sequence
  Description of Artificial Sequence: Synthetic oligonucleotide
  Target: COL7A1; (-) strand; PAM type: YTN; PAM sequence: CTG
gacctcgtggaccactgggg

SEQ ID NO: 26846 - DNA, 20 bp, Artificial Sequence
  Description of Artificial Sequence: Synthetic oligonucleotide
  Target: COL7A1; (-) strand; PAM type: YTN; PAM sequence: CTC
catcagggcccccctggacc

SEQ ID NO: 26847 - DNA, 20 bp, Artificial Sequence
  Description of Artificial Sequence: Synthetic oligonucleotide
  Target: COL7A1; (-) strand; PAM type: YTN; PAM sequence: CTC
ctccatcagggcccccctgg

SEQ ID NO: 26848 - DNA, 20 bp, Artificial Sequence
  Description of Artificial Sequence: Synthetic oligonucleotide
  Target: COL7A1; (-) strand; PAM type: YTN; PAM sequence: TTG
tctcctccatcagggccccc

SEQ ID NO: 26849 - DNA, 20 bp, Artificial Sequence
  Description of Artificial Sequence: Synthetic oligonucleotide
  Target: COL7A1; (-) strand; PAM type: YTN; PAM sequence: TTT
gtctcctccatcagggcccc

SEQ ID NO: 26850 - DNA, 20 bp, Artificial Sequence
  Description of Artificial Sequence: Synthetic oligonucleotide
  Target: COL7A1; (-) strand; PAM type: YTN; PAM sequence: CTT
tgtctcctccatcagggccc

SEQ ID NO: 26851 - DNA, 20 bp, Artificial Sequence
  Description of Artificial Sequence: Synthetic oligonucleotide
  Target: COL7A1; (-) strand; PAM type: YTN; PAM sequence: TTA
tactttgtctcctccatcag

SEQ ID NO: 26852 - DNA, 20 bp, Artificial Sequence
  Description of Artificial Sequence: Synthetic oligonucleotide
  Target: COL7A1; (-) strand; PAM type: YTN; PAM sequence: CTT
atactttgtctcctccatca

SEQ ID NO: 26853 - DNA, 20 bp, Artificial Sequence
  Description of Artificial Sequence: Synthetic oligonucleotide
  Target: COL7A1; (-) strand; PAM type: YTN; PAM sequence: TTG
caccttatactttgtctcct

SEQ ID NO: 26854 - DNA, 20 bp, Artificial Sequence
  Description of Artificial Sequence: Synthetic oligonucleotide
  Target: COL7A1; (-) strand; PAM type: YTN; PAM sequence: CTG
tggggttgcaccttatactt

SEQ ID NO: 26855 - DNA, 20 bp, Artificial Sequence
  Description of Artificial Sequence: Synthetic oligonucleotide
  Target: COL7A1; (-) strand; PAM type: YTN; PAM sequence: CTG
gaccatcggtaagtgcaggg

SEQ ID NO: 26856 - DNA, 20 bp, Artificial Sequence
  Description of Artificial Sequence: Synthetic oligonucleotide
  Target: COL7A1; (-) strand; PAM type: YTN; PAM sequence: CTG
ggcggaaaggggaccctgga

SEQ ID NO: 26857 - DNA, 20 bp, Artificial Sequence
  Description of Artificial Sequence: Synthetic oligonucleotide
  Target: COL7A1; (-) strand; PAM type: YTN; PAM sequence: TTC
ctgggcggaaaggggaccct

SEQ ID NO: 26858 - DNA, 20 bp, Artificial Sequence
  Description of Artificial Sequence: Synthetic oligonucleotide
  Target: COL7A1; (-) strand; PAM type: YTN; PAM sequence: CTT
cctgggcggaaaggggaccc

SEQ ID NO: 26859 - DNA, 20 bp, Artificial Sequence
  Description of Artificial Sequence: Synthetic oligonucleotide
  Target: COL7A1; (-) strand; PAM type: YTN; PAM sequence: CTG
ggcttcctgggcggaaaggg

SEQ ID NO: 26860 - DNA, 20 bp, Artificial Sequence
  Description of Artificial Sequence: Synthetic oligonucleotide
  Target: COL7A1; (-) strand; PAM type: YTN; PAM sequence: CTC
ccggacaagtcatcggaggt

SEQ ID NO: 26861 - DNA, 20 bp, Artificial Sequence
  Description of Artificial Sequence: Synthetic oligonucleotide
  Target: COL7A1; (-) strand; PAM type: YTN; PAM sequence: TTA
cagggggctcccggacaagt

SEQ ID NO: 26862 - DNA, 20 bp, Artificial Sequence
  Description of Artificial Sequence: Synthetic oligonucleotide
  Target: COL7A1; (-) strand; PAM type: YTN; PAM sequence: CTT
acagggggctcccggacaag

SEQ ID NO: 26863 - DNA, 20 bp, Artificial Sequence
  Description of Artificial Sequence: Synthetic oligonucleotide
  Target: COL7A1; (-) strand; PAM type: YTN; PAM sequence: CTG
tccttacagggggctcccgg

SEQ ID NO: 26864 - DNA, 20 bp, Artificial Sequence
  Description of Artificial Sequence: Synthetic oligonucleotide
  Target: COL7A1; (-) strand; PAM type: YTN; PAM sequence: CTC
tgtccttacagggggctccc

SEQ ID NO: 26865 - DNA, 20 bp, Artificial Sequence
  Description of Artificial Sequence: Synthetic oligonucleotide
  Target: COL7A1; (-) strand; PAM type: YTN; PAM sequence: CTC
tctgtccttacagggggctc

SEQ ID NO: 26866 - DNA, 20 bp, Artificial Sequence
  Description of Artificial Sequence: Synthetic oligonucleotide
  Target: COL7A1; (-) strand; PAM type: YTN; PAM sequence: CTG
ctctctgtccttacaggggg

SEQ ID NO: 26867 - DNA, 20 bp, Artificial Sequence
  Description of Artificial Sequence: Synthetic oligonucleotide
  Target: COL7A1; (-) strand; PAM type: YTN; PAM sequence: CTG
cccactgctctctgtcctta

SEQ ID NO: 26868 - DNA, 20 bp, Artificial Sequence
  Description of Artificial Sequence: Synthetic oligonucleotide
  Target: COL7A1; (-) strand; PAM type: YTN; PAM sequence: CTG
aatcctgcccactgctctct

SEQ ID NO: 26869 - DNA, 20 bp, Artificial Sequence
  Description of Artificial Sequence: Synthetic oligonucleotide
  Target: COL7A1; (-) strand; PAM type: YTN; PAM sequence: CTC
aaggcccccatagcctgaat

SEQ ID NO: 26870 - DNA, 20 bp, Artificial Sequence
  Description of Artificial Sequence: Synthetic oligonucleotide
  Target: COL7A1; (-) strand; PAM type: YTN; PAM sequence: TTC
cagctcaaggcccccatagc

SEQ ID NO: 26871 - DNA, 20 bp, Artificial Sequence
  Description of Artificial Sequence: Synthetic oligonucleotide
  Target: COL7A1; (-) strand; PAM type: YTN; PAM sequence: CTT
ccagctcaaggcccccatag

SEQ ID NO: 26872 - DNA, 20 bp, Artificial Sequence
  Description of Artificial Sequence: Synthetic oligonucleotide
  Target: COL7A1; (-) strand; PAM type: YTN; PAM sequence: TTC
ttccagctcaaggcccccat

SEQ ID NO: 26873 - DNA, 20 bp, Artificial Sequence
  Description of Artificial Sequence: Synthetic oligonucleotide
  Target: COL7A1; (-) strand; PAM type: YTN; PAM sequence: CTT
cttccagctcaaggccccca

SEQ ID NO: 26874 - DNA, 20 bp, Artificial Sequence
  Description of Artificial Sequence: Synthetic oligonucleotide
  Target: COL7A1; (-) strand; PAM type: YTN; PAM sequence: CTA
ggggcttcttccagctcaag

SEQ ID NO: 26875 - DNA, 20 bp, Artificial Sequence
  Description of Artificial Sequence: Synthetic oligonucleotide
  Target: COL7A1; (-) strand; PAM type: YTN; PAM sequence: CTG
gacatgtctaggggcttctt

SEQ ID NO: 26876 - DNA, 20 bp, Artificial Sequence
  Description of Artificial Sequence: Synthetic oligonucleotide
  Target: COL7A1; (-) strand; PAM type: YTN; PAM sequence: CTA
aggcgcgaataggaatagct

SEQ ID NO: 26877 - DNA, 20 bp, Artificial Sequence
  Description of Artificial Sequence: Synthetic oligonucleotide
  Target: COL7A1; (-) strand; PAM type: YTN; PAM sequence: CTG
tgcagggcctaaggcgcgaa

SEQ ID NO: 26878 - DNA, 20 bp, Artificial Sequence
  Description of Artificial Sequence: Synthetic oligonucleotide
  Target: COL7A1; (-) strand; PAM type: YTN; PAM sequence: CTG
ccccacaccagaccctgtgc

SEQ ID NO: 26879 - DNA, 20 bp, Artificial Sequence
  Description of Artificial Sequence: Synthetic oligonucleotide
  Target: COL7A1; (-) strand; PAM type: YTN; PAM sequence: CTC
gaggcccaaagggggagccg

SEQ ID NO: 26880 - DNA, 20 bp, Artificial Sequence
  Description of Artificial Sequence: Synthetic oligonucleotide
  Target: COL7A1; (-) strand; PAM type: YTN; PAM sequence: CTC
agggagagcgaggacctcga

SEQ ID NO: 26881 - DNA, 20 bp, Artificial Sequence
  Description of Artificial Sequence: Synthetic oligonucleotide
  Target: COL7A1; (-) strand; PAM type: YTN; PAM sequence: TTC
gtcctcagggagagcgagga

SEQ ID NO: 26882 - DNA, 20 bp, Artificial Sequence
  Description of Artificial Sequence: Synthetic oligonucleotide
  Target: COL7A1; (-) strand; PAM type: YTN; PAM sequence: TTT
cgtcctcagggagagcgagg

SEQ ID NO: 26883 - DNA, 20 bp, Artificial Sequence
  Description of Artificial Sequence: Synthetic oligonucleotide
  Target: COL7A1; (-) strand; PAM type: YTN; PAM sequence: CTG
tttcgtcctcagggagagcg

SEQ ID NO: 26884 - DNA, 20 bp, Artificial Sequence
  Description of Artificial Sequence: Synthetic oligonucleotide
  Target: COL7A1; (-) strand; PAM type: YTN; PAM sequence: CTC
tgtttcgtcctcagggagag

SEQ ID NO: 26885 - DNA, 20 bp, Artificial Sequence
  Description of Artificial Sequence: Synthetic oligonucleotide
  Target: COL7A1; (-) strand; PAM type: YTN; PAM sequence: CTG
ctctgtttcgtcctcaggga

SEQ ID NO: 26886 - DNA, 20 bp, Artificial Sequence
  Description of Artificial Sequence: Synthetic oligonucleotide
  Target: COL7A1; (-) strand; PAM type: YTN; PAM sequence: CTC
tgctctgtttcgtcctcagg

SEQ ID NO: 26887 - DNA, 20 bp, Artificial Sequence
  Description of Artificial Sequence: Synthetic oligonucleotide
  Target: COL7A1; (-) strand; PAM type: YTN; PAM sequence: CTG
agcccaagcaccaccctctg

SEQ ID NO: 26888 - DNA, 20 bp, Artificial Sequence
  Description of Artificial Sequence: Synthetic oligonucleotide
  Target: COL7A1; (-) strand; PAM type: YTN; PAM sequence: TTC
gcctgagcccaagcaccacc

SEQ ID NO: 26889 - DNA, 20 bp, Artificial Sequence
  Description of Artificial Sequence: Synthetic oligonucleotide
  Target: COL7A1; (-) strand; PAM type: YTN; PAM sequence: TTG
acattcgcctgagcccaagc

SEQ ID NO: 26890 - DNA, 20 bp, Artificial Sequence
  Description of Artificial Sequence: Synthetic oligonucleotide
  Target: COL7A1; (-) strand; PAM type: YTN; PAM sequence: CTG
gggtggtggtgcagtgccca

SEQ ID NO: 26891 - DNA, 20 bp, Artificial Sequence
  Description of Artificial Sequence: Synthetic oligonucleotide
  Target: COL7A1; (-) strand; PAM type: YTN; PAM sequence: TTC
cacagggtgggagcctgggg

SEQ ID NO: 26892 - DNA, 20 bp, Artificial Sequence
  Description of Artificial Sequence: Synthetic oligonucleotide
  Target: COL7A1; (-) strand; PAM type: YTN; PAM sequence: CTT
ccacagggtgggagcctggg

SEQ ID NO: 26893 - DNA, 20 bp, Artificial Sequence
  Description of Artificial Sequence: Synthetic oligonucleotide
  Target: COL7A1; (-) strand; PAM type: YTN; PAM sequence: TTC
ttccacagggtgggagcctg

SEQ ID NO: 26894 - DNA, 20 bp, Artificial Sequence
  Description of Artificial Sequence: Synthetic oligonucleotide
  Target: COL7A1; (-) strand; PAM type: YTN; PAM sequence: TTC
ccagggttcttccacagggt

SEQ ID NO: 26895 - DNA, 20 bp, Artificial Sequence
  Description of Artificial Sequence: Synthetic oligonucleotide
  Target: COL7A1; (-) strand; PAM type: YTN; PAM sequence: CTT
cccagggttcttccacaggg

SEQ ID NO: 26896 - DNA, 20 bp, Artificial Sequence
  Description of Artificial Sequence: Synthetic oligonucleotide
  Target: COL7A1; (-) strand; PAM type: YTN; PAM sequence: CTA
agtgtcttcccagggttctt

SEQ ID NO: 26897 - DNA, 20 bp, Artificial Sequence
  Description of Artificial Sequence: Synthetic oligonucleotide
  Target: COL7A1; (-) strand; PAM type: YTN; PAM sequence: CTC
taagtgtcttcccagggttc

SEQ ID NO: 26898 - DNA, 20 bp, Artificial Sequence
  Description of Artificial Sequence: Synthetic oligonucleotide
  Target: COL7A1; (-) strand; PAM type: YTN; PAM sequence: CTC
tctaagtgtcttcccagggt

SEQ ID NO: 26899 - DNA, 20 bp, Artificial Sequence
  Description of Artificial Sequence: Synthetic oligonucleotide
  Target: COL7A1; (-) strand; PAM type: YTN; PAM sequence: TTG
ctctctaagtgtcttcccag

SEQ ID NO: 26900 - DNA, 20 bp, Artificial Sequence
  Description of Artificial Sequence: Synthetic oligonucleotide
  Target: COL7A1; (-) strand; PAM type: YTN; PAM sequence: TTT
gctctctaagtgtcttccca

SEQ ID NO: 26901 - DNA, 20 bp, Artificial Sequence
  Description of Artificial Sequence: Synthetic oligonucleotide
  Target: COL7A1; (-) strand; PAM type: YTN; PAM sequence: CTT
tgctctctaagtgtcttccc

SEQ ID NO: 26902 - DNA, 20 bp, Artificial Sequence
  Description of Artificial Sequence: Synthetic oligonucleotide
  Target: COL7A1; (-) strand; PAM type: YTN; PAM sequence: TTC
tttgctctctaagtgtcttc

SEQ ID NO: 26903 - DNA, 20 bp, Artificial Sequence
  Description of Artificial Sequence: Synthetic oligonucleotide
  Target: COL7A1; (-) strand; PAM type: YTN; PAM sequence: CTT
ctttgctctctaagtgtctt

SEQ ID NO: 26904 - DNA, 20 bp, Artificial Sequence
  Description of Artificial Sequence: Synthetic oligonucleotide
  Target: COL7A1; (-) strand; PAM type: YTN; PAM sequence: TTC
ccttctttgctctctaagtg

SEQ ID NO: 26905 - DNA, 20 bp, Artificial Sequence
  Description of Artificial Sequence: Synthetic oligonucleotide
  Target: COL7A1; (-) strand; PAM type: YTN; PAM sequence: CTT
cccttctttgctctctaagt

SEQ ID NO: 26906 - DNA, 20 bp, Artificial Sequence
  Description of Artificial Sequence: Synthetic oligonucleotide
  Target: COL7A1; (-) strand; PAM type: YTN; PAM sequence: CTC
gtggggacccggtaaggtgc

SEQ ID NO: 26907 - DNA, 20 bp, Artificial Sequence
  Description of Artificial Sequence: Synthetic oligonucleotide
  Target: COL7A1; (-) strand; PAM type: YTN; PAM sequence: CTG
gccctcgtggggacccggta

SEQ ID NO: 26908 - DNA, 20 bp, Artificial Sequence
  Description of Artificial Sequence: Synthetic oligonucleotide
  Target: COL7A1; (-) strand; PAM type: YTN; PAM sequence: TTG
cctggccctcgtggggaccc

SEQ ID NO: 26909 - DNA, 20 bp, Artificial Sequence
  Description of Artificial Sequence: Synthetic oligonucleotide
  Target: COL7A1; (-) strand; PAM type: YTN; PAM sequence: CTC
cagggttgcctggccctcgt

SEQ ID NO: 26910 - DNA, 20 bp, Artificial Sequence
  Description of Artificial Sequence: Synthetic oligonucleotide
  Target: COL7A1; (-) strand; PAM type: YTN; PAM sequence: CTC
tccagggttgcctggccctc

SEQ ID NO: 26911 - DNA, 20 bp, Artificial Sequence
  Description of Artificial Sequence: Synthetic oligonucleotide
  Target: COL7A1; (-) strand; PAM type: YTN; PAM sequence: TTG
cagggctctccagggttgcc

SEQ ID NO: 26912 - DNA, 20 bp, Artificial Sequence
  Description of Artificial Sequence: Synthetic oligonucleotide
  Target: COL7A1; (-) strand; PAM type: YTN; PAM sequence: TTT
gcagggctctccagggttgc

SEQ ID NO: 26913 - DNA, 20 bp, Artificial Sequence
  Description of Artificial Sequence: Synthetic oligonucleotide
  Target: COL7A1; (-) strand; PAM type: YTN; PAM sequence: CTC
catttgcagggctctccagg

SEQ ID NO: 26914 - DNA, 20 bp, Artificial Sequence
  Description of Artificial Sequence: Synthetic oligonucleotide
  Target: COL7A1; (-) strand; PAM type: YTN; PAM sequence: CTG
gcctccatttgcagggctct

SEQ ID NO: 26915 - DNA, 20 bp, Artificial Sequence
  Description of Artificial Sequence: Synthetic oligonucleotide
  Target: COL7A1; (-) strand; PAM type: YTN; PAM sequence: CTC
tggcctccatttgcagggct

SEQ ID NO: 26916 - DNA, 20 bp, Artificial Sequence
  Description of Artificial Sequence: Synthetic oligonucleotide
  Target: COL7A1; (-) strand; PAM type: YTN; PAM sequence: CTG
cctctggcctccatttgcag

SEQ ID NO: 26917 - DNA, 20 bp, Artificial Sequence
  Description of Artificial Sequence: Synthetic oligonucleotide
  Target: COL7A1; (-) strand; PAM type: YTN; PAM sequence: TTC
tgcctctggcctccatttgc

SEQ ID NO: 26918 - DNA, 20 bp, Artificial Sequence
  Description of Artificial Sequence: Synthetic oligonucleotide
  Target: COL7A1; (-) strand; PAM type: YTN; PAM sequence: CTG
ttctgcctctggcctccatt

SEQ ID NO: 26919 - DNA, 20 bp, Artificial Sequence
  Description of Artificial Sequence: Synthetic oligonucleotide
  Target: COL7A1; (-) strand; PAM type: YTN; PAM sequence: CTC
cgactgttctgcctctggcc

SEQ ID NO: 26920 - DNA, 20 bp, Artificial Sequence
  Description of Artificial Sequence: Synthetic oligonucleotide
  Target: COL7A1; (-) strand; PAM type: YTN; PAM sequence: CTG
agtgggtggggtggctccga

SEQ ID NO: 26921 - DNA, 20 bp, Artificial Sequence
  Description of Artificial Sequence: Synthetic oligonucleotide
  Target: COL7A1; (-) strand; PAM type: YTN; PAM sequence: CTG
cctgagtgggtggggtggct

SEQ ID NO: 26922 - DNA, 20 bp, Artificial Sequence
  Description of Artificial Sequence: Synthetic oligonucleotide
  Target: COL7A1; (-) strand; PAM type: YTN; PAM sequence: CTG
caggtcagggtgggcgctgc

SEQ ID NO: 26923 - DNA, 20 bp, Artificial Sequence
  Description of Artificial Sequence: Synthetic oligonucleotide
  Target: COL7A1; (-) strand; PAM type: YTN; PAM sequence: TTG
tcctgcaggtcagggtgggc

SEQ ID NO: 26924 - DNA, 20 bp, Artificial Sequence
  Description of Artificial Sequence: Synthetic oligonucleotide
  Target: COL7A1; (-) strand; PAM type: YTN; PAM sequence: CTT
gtcctgcaggtcagggtggg

SEQ ID NO: 26925 - DNA, 20 bp, Artificial Sequence
  Description of Artificial Sequence: Synthetic oligonucleotide
  Target: COL7A1; (-) strand; PAM type: YTN; PAM sequence: CTA
aaggtgagcaagccttgtcc

SEQ ID NO: 26926 - DNA, 20 bp, Artificial Sequence
  Description of Artificial Sequence: Synthetic oligonucleotide
  Target: COL7A1; (-) strand; PAM type: YTN; PAM sequence: CTG
gcctaaaggtgagcaagcct

SEQ ID NO: 26927 - DNA, 20 bp, Artificial Sequence
  Description of Artificial Sequence: Synthetic oligonucleotide
  Target: COL7A1; (-) strand; PAM type: YTN; PAM sequence: CTG
gagcccctggcctaaaggtg

SEQ ID NO: 26928 - DNA, 20 bp, Artificial Sequence
  Description of Artificial Sequence: Synthetic oligonucleotide
  Target: COL7A1; (-) strand; PAM type: YTN; PAM sequence: CTG
ggacccctggagcccctggc

SEQ ID NO: 26929 - DNA, 20 bp, Artificial Sequence
  Description of Artificial Sequence: Synthetic oligonucleotide
  Target: COL7A1; (-) strand; PAM type: YTN; PAM sequence: CTG
gccgcgccgggaatcctggg

SEQ ID NO: 26930 - DNA, 20 bp, Artificial Sequence
  Description of Artificial Sequence: Synthetic oligonucleotide
  Target: COL7A1; (-) strand; PAM type: YTN; PAM sequence: CTG
gagcagatgggcgtccaggc

SEQ ID NO: 26931 - DNA, 20 bp, Artificial Sequence
  Description of Artificial Sequence: Synthetic oligonucleotide
  Target: COL7A1; (-) strand; PAM type: YTN; PAM sequence: TTC
cctggagcagatgggcgtcc

SEQ ID NO: 26932 - DNA, 20 bp, Artificial Sequence
  Description of Artificial Sequence: Synthetic oligonucleotide
  Target: COL7A1; (-) strand; PAM type: YTN; PAM sequence: CTT
ccctggagcagatgggcgtc

SEQ ID NO: 26933 - DNA, 20 bp, Artificial Sequence
  Description of Artificial Sequence: Synthetic oligonucleotide
  Target: COL7A1; (-) strand; PAM type: YTN; PAM sequence: CTC
agggcttccctggagcagat

SEQ ID NO: 26934 - DNA, 20 bp, Artificial Sequence
  Description of Artificial Sequence: Synthetic oligonucleotide
  Target: COL7A1; (-) strand; PAM type: YTN; PAM sequence: CTC
ctcagggcttccctggagca

SEQ ID NO: 26935 - DNA, 20 bp, Artificial Sequence
  Description of Artificial Sequence: Synthetic oligonucleotide
  Target: COL7A1; (-) strand; PAM type: YTN; PAM sequence: TTC
acctcctcagggcttccctg

SEQ ID NO: 26936 - DNA, 20 bp, Artificial Sequence
  Description of Artificial Sequence: Synthetic oligonucleotide
  Target: COL7A1; (-) strand; PAM type: YTN; PAM sequence: CTT
cacctcctcagggcttccct

SEQ ID NO: 26937 - DNA, 20 bp, Artificial Sequence
  Description of Artificial Sequence: Synthetic oligonucleotide
  Target: COL7A1; (-) strand; PAM type: YTN; PAM sequence: CTC
ttcacctcctcagggcttcc

SEQ ID NO: 26938 - DNA, 20 bp, Artificial Sequence
  Description of Artificial Sequence: Synthetic oligonucleotide
  Target: COL7A1; (-) strand; PAM type: YTN; PAM sequence: CTG
acctcttcacctcctcaggg

SEQ ID NO: 26939 - DNA, 20 bp, Artificial Sequence
  Description of Artificial Sequence: Synthetic oligonucleotide
  Target: COL7A1; (-) strand; PAM type: YTN; PAM sequence: CTG
tcctgacctcttcacctcct

SEQ ID NO: 26940 - DNA, 20 bp, Artificial Sequence
  Description of Artificial Sequence: Synthetic oligonucleotide
  Target: COL7A1; (-) strand; PAM type: YTN; PAM sequence: TTC
ctgtcctgacctcttcacct

SEQ ID NO: 26941 - DNA, 20 bp, Artificial Sequence
  Description of Artificial Sequence: Synthetic oligonucleotide
  Target: COL7A1; (-) strand; PAM type: YTN; PAM sequence: CTT
cctgtcctgacctcttcacc

SEQ ID NO: 26942 - DNA, 20 bp, Artificial Sequence
  Description of Artificial Sequence: Synthetic oligonucleotide
  Target: COL7A1; (-) strand; PAM type: YTN; PAM sequence: TTG
ggggagggtcccttcctgtc

SEQ ID NO: 26943 - DNA, 20 bp, Artificial Sequence
  Description of Artificial Sequence: Synthetic oligonucleotide
  Target: COL7A1; (-) strand; PAM type: YTN; PAM sequence: CTT
gggggagggtcccttcctgt

SEQ ID NO: 26944 - DNA, 20 bp, Artificial Sequence
  Description of Artificial Sequence: Synthetic oligonucleotide
  Target: COL7A1; (-) strand; PAM type: YTN; PAM sequence: CTC
cagcaaaccaggggccttgg

SEQ ID NO: 26945 - DNA, 20 bp, Artificial Sequence
  Description of Artificial Sequence: Synthetic oligonucleotide
  Target: COL7A1; (-) strand; PAM type: YTN; PAM sequence: TTG
atggggtgaggcccctccag

SEQ ID NO: 26946 - DNA, 20 bp, Artificial Sequence
  Description of Artificial Sequence: Synthetic oligonucleotide
  Target: COL7A1; (-) strand; PAM type: YTN; PAM sequence: TTG
ttgatggggtgaggcccctc

SEQ ID NO: 26947 - DNA, 20 bp, Artificial Sequence
  Description of Artificial Sequence: Synthetic oligonucleotide
  Target: COL7A1; (-) strand; PAM type: YTN; PAM sequence: CTT
gttgatggggtgaggcccct

SEQ ID NO: 26948 - DNA, 20 bp, Artificial Sequence
  Description of Artificial Sequence: Synthetic oligonucleotide
  Target: COL7A1; (-) strand; PAM type: YTN; PAM sequence: TTG
ggggtcagtggggtaggcga

SEQ ID NO: 26949 - DNA, 20 bp, Artificial Sequence
  Description of Artificial Sequence: Synthetic oligonucleotide
  Target: COL7A1; (-) strand; PAM type: YTN; PAM sequence: CTT
gggggtcagtggggtaggcg

SEQ ID NO: 26950 - DNA, 20 bp, Artificial Sequence
  Description of Artificial Sequence: Synthetic oligonucleotide
  Target: COL7A1; (-) strand; PAM type: YTN; PAM sequence: TTC
cacccccaataacacttggg

SEQ ID NO: 26951 - DNA, 20 bp, Artificial Sequence
  Description of Artificial Sequence: Synthetic oligonucleotide
  Target: COL7A1; (-) strand; PAM type: YTN; PAM sequence: CTG
ttccacccccaataacactt

SEQ ID NO: 26952 - DNA, 20 bp, Artificial Sequence
  Description of Artificial Sequence: Synthetic oligonucleotide
  Target: COL7A1; (-) strand; PAM type: YTN; PAM sequence: CTC
actgttccacccccaataac

SEQ ID NO: 26953 - DNA, 20 bp, Artificial Sequence
  Description of Artificial Sequence: Synthetic oligonucleotide
  Target: COL7A1; (-) strand; PAM type: YTN; PAM sequence: CTG
cctcactgttccacccccaa

SEQ ID NO: 26954 - DNA, 20 bp, Artificial Sequence
  Description of Artificial Sequence: Synthetic oligonucleotide
  Target: COL7A1; (-) strand; PAM type: YTN; PAM sequence: CTC
tgcctcactgttccaccccc

SEQ ID NO: 26955 - DNA, 20 bp, Artificial Sequence
  Description of Artificial Sequence: Synthetic oligonucleotide
  Target: COL7A1; (-) strand; PAM type: YTN; PAM sequence: TTC
tctgcctcactgttccaccc

SEQ ID NO: 26956 - DNA, 20 bp, Artificial Sequence
  Description of Artificial Sequence: Synthetic oligonucleotide
  Target: COL7A1; (-) strand; PAM type: YTN; PAM sequence: TTT
ctctgcctcactgttccacc

SEQ ID NO: 26957 - DNA, 20 bp, Artificial Sequence
  Description of Artificial Sequence: Synthetic oligonucleotide
  Target: COL7A1; (-) strand; PAM type: YTN; PAM sequence: CTG
aggggccatttctctgcctc

SEQ ID NO: 26958 - DNA, 20 bp, Artificial Sequence
  Description of Artificial Sequence: Synthetic oligonucleotide
  Target: COL7A1; (-) strand; PAM type: YTN; PAM sequence: CTC
tgaggggccatttctctgcc

SEQ ID NO: 26959 - DNA, 20 bp, Artificial Sequence
  Description of Artificial Sequence: Synthetic oligonucleotide
  Target: COL7A1; (-) strand; PAM type: YTN; PAM sequence: CTG
tgaagctctgaggggccatt

SEQ ID NO: 26960 - DNA, 20 bp, Artificial Sequence
  Description of Artificial Sequence: Synthetic oligonucleotide
  Target: COL7A1; (-) strand; PAM type: YTN; PAM sequence: CTC
tgtgaagctctgaggggcca

SEQ ID NO: 26961 - DNA, 20 bp, Artificial Sequence
  Description of Artificial Sequence: Synthetic oligonucleotide
  Target: COL7A1; (-) strand; PAM type: YTN; PAM sequence: TTG
ggctctgtgaagctctgagg

SEQ ID NO: 26962 - DNA, 20 bp, Artificial Sequence
  Description of Artificial Sequence: Synthetic oligonucleotide
  Target: COL7A1; (-) strand; PAM type: YTN; PAM sequence: CTG
gaattgggctctgtgaagct

SEQ ID NO: 26963 - DNA, 20 bp, Artificial Sequence
  Description of Artificial Sequence: Synthetic oligonucleotide
  Target: COL7A1; (-) strand; PAM type: YTN; PAM sequence: TTG
tgcctggaattgggctctgt

SEQ ID NO: 26964 - DNA, 20 bp, Artificial Sequence
  Description of Artificial Sequence: Synthetic oligonucleotide
  Target: COL7A1; (-) strand; PAM type: YTN; PAM sequence: CTT
gtgcctggaattgggctctg

SEQ ID NO: 26965 - DNA, 20 bp, Artificial Sequence
  Description of Artificial Sequence: Synthetic oligonucleotide
  Target: COL7A1; (-) strand; PAM type: YTN; PAM sequence: CTG
cccttgtgcctggaattggg

SEQ ID NO: 26966 - DNA, 20 bp, Artificial Sequence
  Description of Artificial Sequence: Synthetic oligonucleotide
  Target: COL7A1; (-) strand; PAM type: YTN; PAM sequence: TTG
tcgctgcccttgtgcctgga

SEQ ID NO: 26967 - DNA, 20 bp, Artificial Sequence
  Description of Artificial Sequence: Synthetic oligonucleotide
  Target: COL7A1; (-) strand; PAM type: YTN; PAM sequence: CTT
gtcgctgcccttgtgcctgg

SEQ ID NO: 26968 - DNA, 20 bp, Artificial Sequence
  Description of Artificial Sequence: Synthetic oligonucleotide
  Target: COL7A1; (-) strand; PAM type: YTN; PAM sequence: CTG
ccttgtcgctgcccttgtgc

SEQ ID NO: 26969 - DNA, 20 bp, Artificial Sequence
  Description of Artificial Sequence: Synthetic oligonucleotide
  Target: COL7A1; (-) strand; PAM type: YTN; PAM sequence: CTC
tgccttgtcgctgcccttgt

SEQ ID NO: 26970 - DNA, 20 bp, Artificial Sequence
  Description of Artificial Sequence: Synthetic oligonucleotide
  Target: COL7A1; (-) strand; PAM type: YTN; PAM sequence: CTC
caagtcccagaggcagggaa

SEQ ID NO: 26971 - DNA, 20 bp, Artificial Sequence
  Description of Artificial Sequence: Synthetic oligonucleotide
  Target: COL7A1; (-) strand; PAM type: YTN; PAM sequence: CTG
agcagcagctccaagtccca

SEQ ID NO: 26972 - DNA, 20 bp, Artificial Sequence
  Description of Artificial Sequence: Synthetic oligonucleotide
  Target: COL7A1; (-) strand; PAM type: YTN; PAM sequence: CTG
cagagcctgagcagcagctc

SEQ ID NO: 26973 - DNA, 20 bp, Artificial Sequence
  Description of Artificial Sequence: Synthetic oligonucleotide
  Target: COL7A1; (-) strand; PAM type: YTN; PAM sequence: CTA
gccccgctgcagagcctgag

SEQ ID NO: 26974 - DNA, 20 bp, Artificial Sequence
  Description of Artificial Sequence: Synthetic oligonucleotide
  Target: COL7A1; (-) strand; PAM type: YTN; PAM sequence: CTC
tagccccgctgcagagcctg

SEQ ID NO: 26975 - DNA, 20 bp, Artificial Sequence
  Description of Artificial Sequence: Synthetic oligonucleotide
  Target: COL7A1; (-) strand; PAM type: YTN; PAM sequence: CTG
aaatagaagggccagtgggg

SEQ ID NO: 26976 - DNA, 20 bp, Artificial Sequence
  Description of Artificial Sequence: Synthetic oligonucleotide
  Target: COL7A1; (-) strand; PAM type: YTN; PAM sequence: CTC
tgaaatagaagggccagtgg

SEQ ID NO: 26977 - DNA, 20 bp, Artificial Sequence
  Description of Artificial Sequence: Synthetic oligonucleotide
  Target: COL7A1; (-) strand; PAM type: YTN; PAM sequence: TTG
ggggacactctgaaatagaa

SEQ ID NO: 26978 - DNA, 20 bp, Artificial Sequence
  Description of Artificial Sequence: Synthetic oligonucleotide
  Target: COL7A1; (-) strand; PAM type: YTN; PAM sequence: TTT
gggggacactctgaaataga

SEQ ID NO: 26979 - DNA, 20 bp, Artificial Sequence
  Description of Artificial Sequence: Synthetic oligonucleotide
  Target: COL7A1; (-) strand; PAM type: YTN; PAM sequence: CTT
tgggggacactctgaaatag

SEQ ID NO: 26980 - DNA, 20 bp, Artificial Sequence
  Description of Artificial Sequence: Synthetic oligonucleotide
  Target: COL7A1; (-) strand; PAM type: YTN; PAM sequence: TTA
taaaccaccacagagacttt

SEQ ID NO: 26981 - DNA, 20 bp, Artificial Sequence
  Description of Artificial Sequence: Synthetic oligonucleotide
  Target: COL7A1; (-) strand; PAM type: YTN; PAM sequence: CTG
gaggttataaaccaccacag

SEQ ID NO: 26982 - DNA, 20 bp, Artificial Sequence
  Description of Artificial Sequence: Synthetic oligonucleotide
  Target: COL7A1; (-) strand; PAM type: YTN; PAM sequence: CTA
gaagcccagctggaggttat

SEQ ID NO: 26983 - DNA, 20 bp, Artificial Sequence
  Description of Artificial Sequence: Synthetic oligonucleotide
  Target: COL7A1; (-) strand; PAM type: YTN; PAM sequence: TTC
ctagaagcccagctggaggt

SEQ ID NO: 26984 - DNA, 20 bp, Artificial Sequence
  Description of Artificial Sequence: Synthetic oligonucleotide
  Target: COL7A1; (-) strand; PAM type: YTN; PAM sequence: TTA
gaatcatcgggaattcctag

SEQ ID NO: 26985 - DNA, 20 bp, Artificial Sequence
  Description of Artificial Sequence: Synthetic oligonucleotide
  Target: COL7A1; (-) strand; PAM type: YTN; PAM sequence: TTA
caagagagaaggaagaagca

SEQ ID NO: 26986 - DNA, 20 bp, Artificial Sequence
  Description of Artificial Sequence: Synthetic oligonucleotide
  Target: COL7A1; (-) strand; PAM type: YTN; PAM sequence: TTT
acaagagagaaggaagaagc

SEQ ID NO: 26987 - DNA, 20 bp, Artificial Sequence
  Description of Artificial Sequence: Synthetic oligonucleotide
  Target: COL7A1; (-) strand; PAM type: YTN; PAM sequence: TTT
tacaagagagaaggaagaag

SEQ ID NO: 26988 - DNA, 20 bp, Artificial Sequence
  Description of Artificial Sequence: Synthetic oligonucleotide
  Target: COL7A1; (-) strand; PAM type: YTN; PAM sequence: TTT
ttacaagagagaaggaagaa

SEQ ID NO: 26989 - DNA, 20 bp, Artificial Sequence
  Description of Artificial Sequence: Synthetic oligonucleotide
  Target: COL7A1; (-) strand; PAM type: YTN; PAM sequence: CTC
ggggtttttacaagagagaa

SEQ ID NO: 26990 - DNA, 20 bp, Artificial Sequence
  Description of Artificial Sequence: Synthetic oligonucleotide
  Target: COL7A1; (-) strand; PAM type: YTN; PAM sequence: CTG
tctcggggtttttacaagag

SEQ ID NO: 26991 - DNA, 20 bp, Artificial Sequence
  Description of Artificial Sequence: Synthetic oligonucleotide
  Target: COL7A1; (-) strand; PAM type: YTN; PAM sequence: CTC
aaagctgtctcggggttttt

SEQ ID NO: 26992 - DNA, 20 bp, Artificial Sequence
  Description of Artificial Sequence: Synthetic oligonucleotide
  Target: COL7A1; (-) strand; PAM type: YTN; PAM sequence: CTC
ctcaaagctgtctcggggtt

SEQ ID NO: 26993 - DNA, 20 bp, Artificial Sequence
  Description of Artificial Sequence: Synthetic oligonucleotide
  Target: COL7A1; (-) strand; PAM type: YTN; PAM sequence: CTG
aggcactcctcaaagctgtc

SEQ ID NO: 26994 - DNA, 20 bp, Artificial Sequence
  Description of Artificial Sequence: Synthetic oligonucleotide
  Target: COL7A1; (-) strand; PAM type: YTN; PAM sequence: CTC
tgaggcactcctcaaagctg

SEQ ID NO: 26995 - DNA, 20 bp, Artificial Sequence
  Description of Artificial Sequence: Synthetic oligonucleotide
  Target: COL7A1; (-) strand; PAM type: YTN; PAM sequence: TTC
tctgaggcactcctcaaagc

SEQ ID NO: 26996 - DNA, 20 bp, Artificial Sequence
  Description of Artificial Sequence: Synthetic oligonucleotide
  Target: COL7A1; (-) strand; PAM type: YTN; PAM sequence: TTT
ctctgaggcactcctcaaag

SEQ ID NO: 26997 - DNA, 20 bp, Artificial Sequence
  Description of Artificial Sequence: Synthetic oligonucleotide
  Target: COL7A1; (-) strand; PAM type: YTN; PAM sequence: CTG
ccaagggcgagagggtgagt

SEQ ID NO: 26998 - DNA, 20 bp, Artificial Sequence
  Description of Artificial Sequence: Synthetic oligonucleotide
  Target: COL7A1; (-) strand; PAM type: YTN; PAM sequence: CTG
gaagtgccactgccaagggc

SEQ ID NO: 26999 - DNA, 20 bp, Artificial Sequence
  Description of Artificial Sequence: Synthetic oligonucleotide
  Target: COL7A1; (-) strand; PAM type: YTN; PAM sequence: CTC
ccggcccccaggggccccct

SEQ ID NO: 27000 - DNA, 20 bp, Artificial Sequence
  Description of Artificial Sequence: Synthetic oligonucleotide
  Target: COL7A1; (-) strand; PAM type: YTN; PAM sequence: TTC
agggcaggaccggtgctccc

SEQ ID NO: 27001 - DNA, 20 bp, Artificial Sequence
  Description of Artificial Sequence: Synthetic oligonucleotide
  Target: COL7A1; (-) strand; PAM type: YTN; PAM sequence: TTT
cagggcaggaccggtgctcc

SEQ ID NO: 27002 - DNA, 20 bp, Artificial Sequence
  Description of Artificial Sequence: Synthetic oligonucleotide
  Target: COL7A1; (-) strand; PAM type: YTN; PAM sequence: CTT
tcagggcaggaccggtgctc

SEQ ID NO: 27003 - DNA, 20 bp, Artificial Sequence
  Description of Artificial Sequence: Synthetic oligonucleotide
  Target: COL7A1; (-) strand; PAM type: YTN; PAM sequence: TTC
tttcagggcaggaccggtgc

SEQ ID NO: 27004 - DNA, 20 bp, Artificial Sequence
  Description of Artificial Sequence: Synthetic oligonucleotide
  Target: COL7A1; (-) strand; PAM type: YTN; PAM sequence: CTT
ctttcagggcaggaccggtg

SEQ ID NO: 27005 - DNA, 20 bp, Artificial Sequence
  Description of Artificial Sequence: Synthetic oligonucleotide
  Target: COL7A1; (-) strand; PAM type: YTN; PAM sequence: CTA
tcttctttcagggcaggacc

SEQ ID NO: 27006 - DNA, 20 bp, Artificial Sequence
  Description of Artificial Sequence: Synthetic oligonucleotide
  Target: COL7A1; (-) strand; PAM type: YTN; PAM sequence: CTG
ctatcttctttcagggcagg

SEQ ID NO: 27007 - DNA, 20 bp, Artificial Sequence
  Description of Artificial Sequence: Synthetic oligonucleotide
  Target: COL7A1; (-) strand; PAM type: YTN; PAM sequence: CTA
actgctatcttctttcaggg

SEQ ID NO: 27008 - DNA, 20 bp, Artificial Sequence
  Description of Artificial Sequence: Synthetic oligonucleotide
  Target: COL7A1; (-) strand; PAM type: YTN; PAM sequence: TTA
tccccacctaactgctatct

SEQ ID NO: 27009 - DNA, 20 bp, Artificial Sequence
  Description of Artificial Sequence: Synthetic oligonucleotide
  Target: COL7A1; (-) strand; PAM type: YTN; PAM sequence: CTT
atccccacctaactgctatc

SEQ ID NO: 27010 - DNA, 20 bp, Artificial Sequence
  Description of Artificial Sequence: Synthetic oligonucleotide
  Target: COL7A1; (-) strand; PAM type: YTN; PAM sequence: CTG
gcttatccccacctaactgc

SEQ ID NO: 27011 - DNA, 20 bp, Artificial Sequence
  Description of Artificial Sequence: Synthetic oligonucleotide
  Target: COL7A1; (-) strand; PAM type: YTN; PAM sequence: CTG
actggcttatccccacctaa

SEQ ID NO: 27012 - DNA, 20 bp, Artificial Sequence
  Description of Artificial Sequence: Synthetic oligonucleotide
  Target: COL7A1; (-) strand; PAM type: YTN; PAM sequence: CTG
caccctgactggcttatccc

SEQ ID NO: 27013 - DNA, 20 bp, Artificial Sequence
  Description of Artificial Sequence: Synthetic oligonucleotide
  Target: COL7A1; (-) strand; PAM type: YTN; PAM sequence: CTG
tccctgcaccctgactggct

SEQ ID NO: 27014 - DNA, 20 bp, Artificial Sequence
  Description of Artificial Sequence: Synthetic oligonucleotide
  Target: COL7A1; (-) strand; PAM type: YTN; PAM sequence: CTC
ccggtgagtgtcccccacat

SEQ ID NO: 27015 - DNA, 20 bp, Artificial Sequence
  Description of Artificial Sequence: Synthetic oligonucleotide
  Target: COL7A1; (-) strand; PAM type: YTN; PAM sequence: CTG
gcctcccggtgagtgtcccc

SEQ ID NO: 27016 - DNA, 20 bp, Artificial Sequence
  Description of Artificial Sequence: Synthetic oligonucleotide
  Target: COL7A1; (-) strand; PAM type: YTN; PAM sequence: CTG
gcgaccctggcctcccggtg

SEQ ID NO: 27017 - DNA, 20 bp, Artificial Sequence
  Description of Artificial Sequence: Synthetic oligonucleotide
  Target: COL7A1; (-) strand; PAM type: YTN; PAM sequence: CTC
ctggcgaccctggcctcccg

SEQ ID NO: 27018 - DNA, 20 bp, Artificial Sequence
  Description of Artificial Sequence: Synthetic oligonucleotide
  Target: COL7A1; (-) strand; PAM type: YTN; PAM sequence: TTG
ggcctcctggcgaccctggc

SEQ ID NO: 27019 - DNA, 20 bp, Artificial Sequence
  Description of Artificial Sequence: Synthetic oligonucleotide
  Target: COL7A1; (-) strand; PAM type: YTN; PAM sequence: CTG
agaggacaagttgggcctcc

SEQ ID NO: 27020 - DNA, 20 bp, Artificial Sequence
  Description of Artificial Sequence: Synthetic oligonucleotide
  Target: COL7A1; (-) strand; PAM type: YTN; PAM sequence: CTA
gggcctgagaggacaagttg

SEQ ID NO: 27021 - DNA, 20 bp, Artificial Sequence
  Description of Artificial Sequence: Synthetic oligonucleotide
  Target: COL7A1; (-) strand; PAM type: YTN; PAM sequence: TTC
ctagggcctgagaggacaag

SEQ ID NO: 27022 - DNA, 20 bp, Artificial Sequence
  Description of Artificial Sequence: Synthetic oligonucleotide
  Target: COL7A1; (-) strand; PAM type: YTN; PAM sequence: CTT
cctagggcctgagaggacaa

SEQ ID NO: 27023 - DNA, 20 bp, Artificial Sequence
  Description of Artificial Sequence: Synthetic oligonucleotide
  Target: COL7A1; (-) strand; PAM type: YTN; PAM sequence: TTA
cccttcctagggcctgagag

SEQ ID NO: 27024 - DNA, 20 bp, Artificial Sequence
  Description of Artificial Sequence: Synthetic oligonucleotide
  Target: COL7A1; (-) strand; PAM type: YTN; PAM sequence: CTG
attacccttcctagggcctg

SEQ ID NO: 27025 - DNA, 20 bp, Artificial Sequence
  Description of Artificial Sequence: Synthetic oligonucleotide
  Target: COL7A1; (-) strand; PAM type: YTN; PAM sequence: CTC
actgattacccttcctaggg

SEQ ID NO: 27026 - DNA, 20 bp, Artificial Sequence
  Description of Artificial Sequence: Synthetic oligonucleotide
  Target: COL7A1; (-) strand; PAM type: YTN; PAM sequence: TTG
gcagcacaggtctcactgat

SEQ ID NO: 27027 - DNA, 20 bp, Artificial Sequence
  Description of Artificial Sequence: Synthetic oligonucleotide
  Target: COL7A1; (-) strand; PAM type: YTN; PAM sequence: TTG
agtgtcagtggggcaggaga

SEQ ID NO: 27028 - DNA, 20 bp, Artificial Sequence
  Description of Artificial Sequence: Synthetic oligonucleotide
  Target: COL7A1; (-) strand; PAM type: YTN; PAM sequence: CTG
cgggcggggaatagagaatg

SEQ ID NO: 27029 - DNA, 20 bp, Artificial Sequence
  Description of Artificial Sequence: Synthetic oligonucleotide
  Target: COL7A1; (-) strand; PAM type: YTN; PAM sequence: CTG
gagagatggtgagtgcccct

SEQ ID NO: 27030 - DNA, 20 bp, Artificial Sequence
  Description of Artificial Sequence: Synthetic oligonucleotide
  Target: COL7A1; (-) strand; PAM type: YTN; PAM sequence: TTC
cccagggccagaagggggaa

SEQ ID NO: 27031 - DNA, 20 bp, Artificial Sequence
  Description of Artificial Sequence: Synthetic oligonucleotide
  Target: COL7A1; (-) strand; PAM type: YTN; PAM sequence: TTT
ccccagggccagaaggggga

SEQ ID NO: 27032 - DNA, 20 bp, Artificial Sequence
  Description of Artificial Sequence: Synthetic oligonucleotide
  Target: COL7A1; (-) strand; PAM type: YTN; PAM sequence: CTT
tccccagggccagaaggggg

SEQ ID NO: 27033 - DNA, 20 bp, Artificial Sequence
  Description of Artificial Sequence: Synthetic oligonucleotide
  Target: COL7A1; (-) strand; PAM type: YTN; PAM sequence: CTG
acatgtctttccccagggcc

SEQ ID NO: 27034 - DNA, 20 bp, Artificial Sequence
  Description of Artificial Sequence: Synthetic oligonucleotide
  Target: COL7A1; (-) strand; PAM type: YTN; PAM sequence: CTG
acccacatctgacatgtctt

SEQ ID NO: 27035 - DNA, 20 bp, Artificial Sequence
  Description of Artificial Sequence: Synthetic oligonucleotide
  Target: COL7A1; (-) strand; PAM type: YTN; PAM sequence: CTC
tgacccacatctgacatgtc

SEQ ID NO: 27036 - DNA, 20 bp, Artificial Sequence
  Description of Artificial Sequence: Synthetic oligonucleotide
  Target: COL7A1; (-) strand; PAM type: YTN; PAM sequence: CTA
gccactctgacccacatctg

SEQ ID NO: 27037 - DNA, 20 bp, Artificial Sequence
  Description of Artificial Sequence: Synthetic oligonucleotide
  Target: COL7A1; (-) strand; PAM type: YTN; PAM sequence: CTG
gggctagccactctgaccca

SEQ ID NO: 27038 - DNA, 20 bp, Artificial Sequence
  Description of Artificial Sequence: Synthetic oligonucleotide
  Target: COL7A1; (-) strand; PAM type: YTN; PAM sequence: CTG
cacctggggctagccactct

SEQ ID NO: 27039 - DNA, 20 bp, Artificial Sequence
  Description of Artificial Sequence: Synthetic oligonucleotide
  Target: COL7A1; (-) strand; PAM type: YTN; PAM sequence: CTC
atcgagaggtgaacagaggc

SEQ ID NO: 27040 - DNA, 20 bp, Artificial Sequence
  Description of Artificial Sequence: Synthetic oligonucleotide
  Target: COL7A1; (-) strand; PAM type: YTN; PAM sequence: TTG
tccaaaggtaagagtccctc

SEQ ID NO: 27041 - DNA, 20 bp, Artificial Sequence
  Description of Artificial Sequence: Synthetic oligonucleotide
  Target: COL7A1; (-) strand; PAM type: YTN; PAM sequence: CTG
cccagtgtattgtccaaagg

SEQ ID NO: 27042 - DNA, 20 bp, Artificial Sequence
  Description of Artificial Sequence: Synthetic oligonucleotide
  Target: COL7A1; (-) strand; PAM type: YTN; PAM sequence: CTA
tgtccgcagccccggccaga

SEQ ID NO: 27043 - DNA, 20 bp, Artificial Sequence
  Description of Artificial Sequence: Synthetic oligonucleotide
  Target: COL7A1; (-) strand; PAM type: YTN; PAM sequence: CTC
aaagagaccctatgtccgca

SEQ ID NO: 27044 - DNA, 20 bp, Artificial Sequence
  Description of Artificial Sequence: Synthetic oligonucleotide
  Target: COL7A1; (-) strand; PAM type: YTN; PAM sequence: TTC
aacctcaaagagaccctatg

SEQ ID NO: 27045 - DNA, 20 bp, Artificial Sequence
  Description of Artificial Sequence: Synthetic oligonucleotide
  Target: COL7A1; (-) strand; PAM type: YTN; PAM sequence: TTG
gtagaaatgttcaacctcaa

SEQ ID NO: 27046 - DNA, 20 bp, Artificial Sequence
  Description of Artificial Sequence: Synthetic oligonucleotide
  Target: COL7A1; (-) strand; PAM type: YTN; PAM sequence: CTT
ggtagaaatgttcaacctca

SEQ ID NO: 27047 - DNA, 20 bp, Artificial Sequence
  Description of Artificial Sequence: Synthetic oligonucleotide
  Target: COL7A1; (-) strand; PAM type: YTN; PAM sequence: TTC
ttggtagaaatgttcaacct

SEQ ID NO: 27048 - DNA, 20 bp, Artificial Sequence
  Description of Artificial Sequence: Synthetic oligonucleotide
  Target: COL7A1; (-) strand; PAM type: YTN; PAM sequence: CTG
ggggttcttggtagaaatgt

SEQ ID NO: 27049 - DNA, 20 bp, Artificial Sequence
  Description of Artificial Sequence: Synthetic oligonucleotide
  Target: COL7A1; (-) strand; PAM type: YTN; PAM sequence: CTG
ggtggtagaatataaggggt

SEQ ID NO: 27050 - DNA, 20 bp, Artificial Sequence
  Description of Artificial Sequence: Synthetic oligonucleotide
  Target: COL7A1; (-) strand; PAM type: YTN; PAM sequence: CTG
ggggactgggtggtagaata

SEQ ID NO: 27051 - DNA, 20 bp, Artificial Sequence
  Description of Artificial Sequence: Synthetic oligonucleotide
  Target: COL7A1; (-) strand; PAM type: YTN; PAM sequence: CTC
tgggggactgggtggtagaa

SEQ ID NO: 27052 - DNA, 20 bp, Artificial Sequence
  Description of Artificial Sequence: Synthetic oligonucleotide
  Target: COL7A1; (-) strand; PAM type: YTN; PAM sequence: TTG
gaagaggcctctgggggact

SEQ ID NO: 27053 - DNA, 20 bp, Artificial Sequence
  Description of Artificial Sequence: Synthetic oligonucleotide
  Target: COL7A1; (-) strand; PAM type: YTN; PAM sequence: TTT
ggaagaggcctctgggggac

SEQ ID NO: 27054 - DNA, 20 bp, Artificial Sequence
  Description of Artificial Sequence: Synthetic oligonucleotide
  Target: COL7A1; (-) strand; PAM type: YTN; PAM sequence: CTC
aggtttggaagaggcctctg

SEQ ID NO: 27055 - DNA, 20 bp, Artificial Sequence
  Description of Artificial Sequence: Synthetic oligonucleotide
  Target: COL7A1; (-) strand; PAM type: YTN; PAM sequence: CTA
ctcaggtttggaagaggcct

SEQ ID NO: 27056 - DNA, 20 bp, Artificial Sequence
  Description of Artificial Sequence: Synthetic oligonucleotide
  Target: COL7A1; (-) strand; PAM type: YTN; PAM sequence: TTC
actactcaggtttggaagag

SEQ ID NO: 27057 - DNA, 20 bp, Artificial Sequence
  Description of Artificial Sequence: Synthetic oligonucleotide
  Target: COL7A1; (-) strand; PAM type: YTN; PAM sequence: CTT
cactactcaggtttggaaga

SEQ ID NO: 27058 - DNA, 20 bp, Artificial Sequence
  Description of Artificial Sequence: Synthetic oligonucleotide
  Target: COL7A1; (-) strand; PAM type: YTN; PAM sequence: CTG
tgtcaggcatccttcactac

SEQ ID NO: 27059 - DNA, 20 bp, Artificial Sequence
  Description of Artificial Sequence: Synthetic oligonucleotide
  Target: COL7A1; (-) strand; PAM type: YTN; PAM sequence: CTG
gccacagccctgtgtcaggc

SEQ ID NO: 27060 - DNA, 20 bp, Artificial Sequence
  Description of Artificial Sequence: Synthetic oligonucleotide
  Target: COL7A1; (-) strand; PAM type: YTN; PAM sequence: CTG
gaccaggcagtcagtggtct

SEQ ID NO: 27061 - DNA, 20 bp, Artificial Sequence
  Description of Artificial Sequence: Synthetic oligonucleotide
  Target: COL7A1; (-) strand; PAM type: YTN; PAM sequence: TTC
gccgtggatgatgggccaag

SEQ ID NO: 27062 - DNA, 20 bp, Artificial Sequence
  Description of Artificial Sequence: Synthetic oligonucleotide
  Target: COL7A1; (-) strand; PAM type: YTN; PAM sequence: CTT
cgccgtggatgatgggccaa

SEQ ID NO: 27063 - DNA, 20 bp, Artificial Sequence
  Description of Artificial Sequence: Synthetic oligonucleotide
  Target: COL7A1; (-) strand; PAM type: YTN; PAM sequence: TTC
ttcgccgtggatgatgggcc

SEQ ID NO: 27064 - DNA, 20 bp, Artificial Sequence
  Description of Artificial Sequence: Synthetic oligonucleotide
  Target: COL7A1; (-) strand; PAM type: YTN; PAM sequence: CTT
cttcgccgtggatgatgggc

SEQ ID NO: 27065 - DNA, 20 bp, Artificial Sequence
  Description of Artificial Sequence: Synthetic oligonucleotide
  Target: COL7A1; (-) strand; PAM type: YTN; PAM sequence: CTG
tccagaccttcttcgccgtg

SEQ ID NO: 27066 - DNA, 20 bp, Artificial Sequence
  Description of Artificial Sequence: Synthetic oligonucleotide
  Target: COL7A1; (-) strand; PAM type: YTN; PAM sequence: CTC
tgtccagaccttcttcgccg

SEQ ID NO: 27067 - DNA, 20 bp, Artificial Sequence
  Description of Artificial Sequence: Synthetic oligonucleotide
  Target: COL7A1; (-) strand; PAM type: YTN; PAM sequence: TTG
gcgccgggtatggactctgt

SEQ ID NO: 27068 - DNA, 20 bp, Artificial Sequence
  Description of Artificial Sequence: Synthetic oligonucleotide
  Target: COL7A1; (-) strand; PAM type: YTN; PAM sequence: CTT
ggcgccgggtatggactctg

SEQ ID NO: 27069 - DNA, 20 bp, Artificial Sequence
  Description of Artificial Sequence: Synthetic oligonucleotide
  Target: COL7A1; (-) strand; PAM type: YTN; PAM sequence: CTG
cgtcgcttggcgccgggtat

SEQ ID NO: 27070 - DNA, 20 bp, Artificial Sequence
  Description of Artificial Sequence: Synthetic oligonucleotide
  Target: COL7A1; (-) strand; PAM type: YTN; PAM sequence: CTG
gagcggacccagagcagctg

SEQ ID NO: 27071 - DNA, 20 bp, Artificial Sequence
  Description of Artificial Sequence: Synthetic oligonucleotide
  Target: COL7A1; (-) strand; PAM type: YTN; PAM sequence: TTG
ggaatggctggagcggaccc

SEQ ID NO: 27072 - DNA, 20 bp, Artificial Sequence
  Description of Artificial Sequence: Synthetic oligonucleotide
  Target: COL7A1; (-) strand; PAM type: YTN; PAM sequence: TTA
atgtggtgatgttgggaatg

SEQ ID NO: 27073 - DNA, 20 bp, Artificial Sequence
  Description of Artificial Sequence: Synthetic oligonucleotide
  Target: COL7A1; (-) strand; PAM type: YTN; PAM sequence: CTT
aatgtggtgatgttgggaat

SEQ ID NO: 27074 - DNA, 20 bp, Artificial Sequence
  Description of Artificial Sequence: Synthetic oligonucleotide
  Target: COL7A1; (-) strand; PAM type: YTN; PAM sequence: TTA
gggcttaatgtggtgatgtt

SEQ ID NO: 27075 - DNA, 20 bp, Artificial Sequence
  Description of Artificial Sequence: Synthetic oligonucleotide
  Target: COL7A1; (-) strand; PAM type: YTN; PAM sequence: CTT
agggcttaatgtggtgatgt

SEQ ID NO: 27076 - DNA, 20 bp, Artificial Sequence
  Description of Artificial Sequence: Synthetic oligonucleotide
  Target: COL7A1; (-) strand; PAM type: YTN; PAM sequence: CTG
gaccccaccttagggcttaa

SEQ ID NO: 27077 - DNA, 20 bp, Artificial Sequence
  Description of Artificial Sequence: Synthetic oligonucleotide
  Target: COL7A1; (-) strand; PAM type: YTN; PAM sequence: CTA
tcatgcagccactggacccc

SEQ ID NO: 27078 - DNA, 20 bp, Artificial Sequence
  Description of Artificial Sequence: Synthetic oligonucleotide
  Target: COL7A1; (-) strand; PAM type: YTN; PAM sequence: CTG
aaaaggctatcatgcagcca

SEQ ID NO: 27079 - DNA, 20 bp, Artificial Sequence
  Description of Artificial Sequence: Synthetic oligonucleotide
  Target: COL7A1; (-) strand; PAM type: YTN; PAM sequence: CTG
ggaataggggtggccctgaa

SEQ ID NO: 27080 - DNA, 20 bp, Artificial Sequence
  Description of Artificial Sequence: Synthetic oligonucleotide
  Target: COL7A1; (-) strand; PAM type: YTN; PAM sequence: CTG
atggggaaggggtctgggaa

SEQ ID NO: 27081 - DNA, 20 bp, Artificial Sequence
  Description of Artificial Sequence: Synthetic oligonucleotide
  Target: COL7A1; (-) strand; PAM type: YTN; PAM sequence: CTG
gtaaggagtaggctgatggg

SEQ ID NO: 27082 - DNA, 20 bp, Artificial Sequence
  Description of Artificial Sequence: Synthetic oligonucleotide
  Target: COL7A1; (-) strand; PAM type: YTN; PAM sequence: TTC
tggtaaggagtaggctgatg

SEQ ID NO: 27083 - DNA, 20 bp, Artificial Sequence
  Description of Artificial Sequence: Synthetic oligonucleotide
  Target: COL7A1; (-) strand; PAM type: YTN; PAM sequence: CTT
ctggtaaggagtaggctgat

SEQ ID NO: 27084 - DNA, 20 bp, Artificial Sequence
  Description of Artificial Sequence: Synthetic oligonucleotide
  Target: COL7A1; (-) strand; PAM type: YTN; PAM sequence: TTC
agccccatccgtgaggccca

SEQ ID NO: 27085 - DNA, 20 bp, Artificial Sequence
  Description of Artificial Sequence: Synthetic oligonucleotide
  Target: COL7A1; (-) strand; PAM type: YTN; PAM sequence: TTG
agaggtgacatattcagccc

SEQ ID NO: 27086 - DNA, 20 bp, Artificial Sequence
  Description of Artificial Sequence: Synthetic oligonucleotide
  Target: COL7A1; (-) strand; PAM type: YTN; PAM sequence: CTT
gagaggtgacatattcagcc

SEQ ID NO: 27087 - DNA, 20 bp, Artificial Sequence
  Description of Artificial Sequence: Synthetic oligonucleotide
  Target: COL7A1; (-) strand; PAM type: YTN; PAM sequence: CTA
gtggatgaacccttgagagg

SEQ ID NO: 27088 - DNA, 20 bp, Artificial Sequence
  Description of Artificial Sequence: Synthetic oligonucleotide
  Target: COL7A1; (-) strand; PAM type: YTN; PAM sequence: CTG
ctagtggatgaacccttgag

SEQ ID NO: 27089 - DNA, 20 bp, Artificial Sequence
  Description of Artificial Sequence: Synthetic oligonucleotide
  Target: COL7A1; (-) strand; PAM type: YTN; PAM sequence: TTC
tgctagtggatgaacccttg

SEQ ID NO: 27090 - DNA, 20 bp, Artificial Sequence
  Description of Artificial Sequence: Synthetic oligonucleotide
  Target: COL7A1; (-) strand; PAM type: YTN; PAM sequence: CTG
ggcgccgccagcacgtacca

SEQ ID NO: 27091 - DNA, 20 bp, Artificial Sequence
  Description of Artificial Sequence: Synthetic oligonucleotide
  Target: COL7A1; (-) strand; PAM type: YTN; PAM sequence: CTC
ctgggcgccgccagcacgta

SEQ ID NO: 27092 - DNA, 20 bp, Artificial Sequence
  Description of Artificial Sequence: Synthetic oligonucleotide
  Target: COL7A1; (-) strand; PAM type: YTN; PAM sequence: TTG
gcaccagatgctcctgggcg

SEQ ID NO: 27093 - DNA, 20 bp, Artificial Sequence
  Description of Artificial Sequence: Synthetic oligonucleotide
  Target: COL7A1; (-) strand; PAM type: YTN; PAM sequence: CTC
acagatacatgttggcacca

SEQ ID NO: 27094 - DNA, 20 bp, Artificial Sequence
  Description of Artificial Sequence: Synthetic oligonucleotide
  Target: COL7A1; (-) strand; PAM type: YTN; PAM sequence: TTC
caggcacagccgtggtcaca

SEQ ID NO: 27095 - DNA, 20 bp, Artificial Sequence
  Description of Artificial Sequence: Synthetic oligonucleotide
  Target: COL7A1; (-) strand; PAM type: YTN; PAM sequence: CTT
ccaggcacagccgtggtcac

SEQ ID NO: 27096 - DNA, 20 bp, Artificial Sequence
  Description of Artificial Sequence: Synthetic oligonucleotide
  Target: COL7A1; (-) strand; PAM type: YTN; PAM sequence: TTC
cttccaggcacagccgtggt

SEQ ID NO: 27097 - DNA, 20 bp, Artificial Sequence
  Description of Artificial Sequence: Synthetic oligonucleotide
  Target: COL7A1; (-) strand; PAM type: YTN; PAM sequence: CTT
ccttccaggcacagccgtgg

SEQ ID NO: 27098 - DNA, 20 bp, Artificial Sequence
  Description of Artificial Sequence: Synthetic oligonucleotide
  Target: COL7A1; (-) strand; PAM type: YTN; PAM sequence: CTG
acatgtccttccttccaggc

SEQ ID NO: 27099 - DNA, 20 bp, Artificial Sequence
  Description of Artificial Sequence: Synthetic oligonucleotide
  Target: COL7A1; (-) strand; PAM type: YTN; PAM sequence: TTC
tgacatgtccttccttccag

SEQ ID NO: 27100 - DNA, 20 bp, Artificial Sequence
  Description of Artificial Sequence: Synthetic oligonucleotide
  Target: COL7A1; (-) strand; PAM type: YTN; PAM sequence: TTG
gtgccccagggttctgacat

SEQ ID NO: 27101 - DNA, 20 bp, Artificial Sequence
  Description of Artificial Sequence: Synthetic oligonucleotide
  Target: COL7A1; (-) strand; PAM type: YTN; PAM sequence: CTT
ggtgccccagggttctgaca

SEQ ID NO: 27102 - DNA, 20 bp, Artificial Sequence
  Description of Artificial Sequence: Synthetic oligonucleotide
  Target: COL7A1; (-) strand; PAM type: YTN; PAM sequence: CTG
ggagcttggtgccccagggt

SEQ ID NO: 27103 - DNA, 20 bp, Artificial Sequence
  Description of Artificial Sequence: Synthetic oligonucleotide
  Target: COL7A1; (-) strand; PAM type: YTN; PAM sequence: CTA
tccactgggagcttggtgcc

SEQ ID NO: 27104 - DNA, 20 bp, Artificial Sequence
  Description of Artificial Sequence: Synthetic oligonucleotide
  Target: COL7A1; (-) strand; PAM type: YTN; PAM sequence: CTG
gggctatccactgggagctt

SEQ ID NO: 27105 - DNA, 20 bp, Artificial Sequence
  Description of Artificial Sequence: Synthetic oligonucleotide
  Target: COL7A1; (-) strand; PAM type: YTN; PAM sequence: CTC
ctggggctatccactgggag

SEQ ID NO: 27106 - DNA, 20 bp, Artificial Sequence
  Description of Artificial Sequence: Synthetic oligonucleotide
  Target: COL7A1; (-) strand; PAM type: YTN; PAM sequence: CTG
cagcaggcatggactcctgg

SEQ ID NO: 27107 - DNA, 20 bp, Artificial Sequence
  Description of Artificial Sequence: Synthetic oligonucleotide
  Target: COL7A1; (-) strand; PAM type: YTN; PAM sequence: CTG
ggtgaggactgcagcaggca

SEQ ID NO: 27108 - DNA, 20 bp, Artificial Sequence
  Description of Artificial Sequence: Synthetic oligonucleotide
  Target: COL7A1; (-) strand; PAM type: YTN; PAM sequence: CTA
catggacccaagtgggaaca

SEQ ID NO: 27109 - DNA, 20 bp, Artificial Sequence
  Description of Artificial Sequence: Synthetic oligonucleotide
  Target: COL7A1; (-) strand; PAM type: YTN; PAM sequence: TTG
caaaggatccgtgacatgcc

SEQ ID NO: 27110 - DNA, 20 bp, Artificial Sequence
  Description of Artificial Sequence: Synthetic oligonucleotide
  Target: COL7A1; (-) strand; PAM type: YTN; PAM sequence: CTT
gcaaaggatccgtgacatgc

SEQ ID NO: 27111 - DNA, 20 bp, Artificial Sequence
  Description of Artificial Sequence: Synthetic oligonucleotide
  Target: COL7A1; (-) strand; PAM type: YTN; PAM sequence: TTA
tcttgcaaaggatccgtgac

SEQ ID NO: 27112 - DNA, 20 bp, Artificial Sequence
  Description of Artificial Sequence: Synthetic oligonucleotide
  Target: COL7A1; (-) strand; PAM type: YTN; PAM sequence: TTG
gcattatcttgcaaaggatc

SEQ ID NO: 27113 - DNA, 20 bp, Artificial Sequence
  Description of Artificial Sequence: Synthetic oligonucleotide
  Target: COL7A1; (-) strand; PAM type: YTN; PAM sequence: CTT
ggcattatcttgcaaaggat

SEQ ID NO: 27114 - DNA, 20 bp, Artificial Sequence
  Description of Artificial Sequence: Synthetic oligonucleotide
  Target: COL7A1; (-) strand; PAM type: YTN; PAM sequence: CTC
ccatgaccttggcattatct

SEQ ID NO: 27115 - DNA, 20 bp, Artificial Sequence
  Description of Artificial Sequence: Synthetic oligonucleotide
  Target: COL7A1; (-) strand; PAM type: YTN; PAM sequence: CTG
aatggctcccatgaccttgg

SEQ ID NO: 27116 - DNA, 20 bp, Artificial Sequence
  Description of Artificial Sequence: Synthetic oligonucleotide
  Target: COL7A1; (-) strand; PAM type: YTN; PAM sequence: TTC
ccactgaatggctcccatga

SEQ ID NO: 27117 - DNA, 20 bp, Artificial Sequence
  Description of Artificial Sequence: Synthetic oligonucleotide
  Target: COL7A1; (-) strand; PAM type: YTN; PAM sequence: CTG
ttcccactgaatggctccca

SEQ ID NO: 27118 - DNA, 20 bp, Artificial Sequence
  Description of Artificial Sequence: Synthetic oligonucleotide
  Target: COL7A1; (-) strand; PAM type: YTN; PAM sequence: CTC
cccactgttcccactgaatg

SEQ ID NO: 27119 - DNA, 20 bp, Artificial Sequence
  Description of Artificial Sequence: Synthetic oligonucleotide
  Target: COL7A1; (-) strand; PAM type: YTN; PAM sequence: TTA
cagtcatcggccctccccac

SEQ ID NO: 27120 - DNA, 20 bp, Artificial Sequence
  Description of Artificial Sequence: Synthetic oligonucleotide
  Target: COL7A1; (-) strand; PAM type: YTN; PAM sequence: CTT
acagtcatcggccctcccca

SEQ ID NO: 27121 - DNA, 20 bp, Artificial Sequence
  Description of Artificial Sequence: Synthetic oligonucleotide
  Target: COL7A1; (-) strand; PAM type: YTN; PAM sequence: CTG
tcttacagtcatcggccctc

SEQ ID NO: 27122 - DNA, 20 bp, Artificial Sequence
  Description of Artificial Sequence: Synthetic oligonucleotide
  Target: COL7A1; (-) strand; PAM type: YTN; PAM sequence: CTG
ctgtcttacagtcatcggcc

SEQ ID NO: 27123 - DNA, 20 bp, Artificial Sequence
  Description of Artificial Sequence: Synthetic oligonucleotide
  Target: COL7A1; (-) strand; PAM type: YTN; PAM sequence: TTG
gcctgctgtcttacagtcat

SEQ ID NO: 27124 - DNA, 20 bp, Artificial Sequence
  Description of Artificial Sequence: Synthetic oligonucleotide
  Target: COL7A1; (-) strand; PAM type: YTN; PAM sequence: TTC
caccccaggttggcctgctg

SEQ ID NO: 27125 - DNA, 20 bp, Artificial Sequence
  Description of Artificial Sequence: Synthetic oligonucleotide
  Target: COL7A1; (-) strand; PAM type: YTN; PAM sequence: CTT
ccaccccaggttggcctgct

SEQ ID NO: 27126 - DNA, 20 bp, Artificial Sequence
  Description of Artificial Sequence: Synthetic oligonucleotide
  Target: COL7A1; (-) strand; PAM type: YTN; PAM sequence: TTC
cttccaccccaggttggcct

SEQ ID NO: 27127 - DNA, 20 bp, Artificial Sequence
  Description of Artificial Sequence: Synthetic oligonucleotide
  Target: COL7A1; (-) strand; PAM type: YTN; PAM sequence: TTT
ccttccaccccaggttggcc

SEQ ID NO: 27128 - DNA, 20 bp, Artificial Sequence
  Description of Artificial Sequence: Synthetic oligonucleotide
  Target: COL7A1; (-) strand; PAM type: YTN; PAM sequence: CTG
tgtttccttccaccccaggt

SEQ ID NO: 27129 - DNA, 20 bp, Artificial Sequence
  Description of Artificial Sequence: Synthetic oligonucleotide
  Target: COL7A1; (-) strand; PAM type: YTN; PAM sequence: CTC
tgtgtttccttccaccccag

SEQ ID NO: 27130 - DNA, 20 bp, Artificial Sequence
  Description of Artificial Sequence: Synthetic oligonucleotide
  Target: COL7A1; (-) strand; PAM type: YTN; PAM sequence: CTC
aggctctgtgtttccttcca

SEQ ID NO: 27131 - DNA, 20 bp, Artificial Sequence
  Description of Artificial Sequence: Synthetic oligonucleotide
  Target: COL7A1; (-) strand; PAM type: YTN; PAM sequence: CTC
ctcaggctctgtgtttcctt

SEQ ID NO: 27132 - DNA, 20 bp, Artificial Sequence
  Description of Artificial Sequence: Synthetic oligonucleotide
  Target: COL7A1; (-) strand; PAM type: YTN; PAM sequence: CTG
tcatcctcctcaggctctgt

SEQ ID NO: 27133 - DNA, 20 bp, Artificial Sequence
  Description of Artificial Sequence: Synthetic oligonucleotide
  Target: COL7A1; (-) strand; PAM type: YTN; PAM sequence: CTC
tgtcatcctcctcaggctct

SEQ ID NO: 27134 - DNA, 20 bp, Artificial Sequence
  Description of Artificial Sequence: Synthetic oligonucleotide
  Target: COL7A1; (-) strand; PAM type: YTN; PAM sequence: CTG
ctctgtcatcctcctcaggc

SEQ ID NO: 27135 - DNA, 20 bp, Artificial Sequence
  Description of Artificial Sequence: Synthetic oligonucleotide
  Target: COL7A1; (-) strand; PAM type: YTN; PAM sequence: CTG
tgcacccccatccctgctct

SEQ ID NO: 27136 - DNA, 20 bp, Artificial Sequence
  Description of Artificial Sequence: Synthetic oligonucleotide
  Target: COL7A1; (-) strand; PAM type: YTN; PAM sequence: CTC
tgtgcacccccatccctgct

SEQ ID NO: 27137 - DNA, 20 bp, Artificial Sequence
  Description of Artificial Sequence: Synthetic oligonucleotide
  Target: COL7A1; (-) strand; PAM type: YTN; PAM sequence: CTC
caggctctgtgcacccccat

SEQ ID NO: 27138 - DNA, 20 bp, Artificial Sequence
  Description of Artificial Sequence: Synthetic oligonucleotide
  Target: COL7A1; (-) strand; PAM type: YTN; PAM sequence: TTC
tccaggctctgtgcaccccc

SEQ ID NO: 27139 - DNA, 20 bp, Artificial Sequence
  Description of Artificial Sequence: Synthetic oligonucleotide
  Target: COL7A1; (-) strand; PAM type: YTN; PAM sequence: TTT
ctccaggctctgtgcacccc

SEQ ID NO: 27140 - DNA, 20 bp, Artificial Sequence
  Description of Artificial Sequence: Synthetic oligonucleotide
  Target: COL7A1; (-) strand; PAM type: YTN; PAM sequence: CTG
atgtgtttctccaggctctg

SEQ ID NO: 27141 - DNA, 20 bp, Artificial Sequence
  Description of Artificial Sequence: Synthetic oligonucleotide
  Target: COL7A1; (-) strand; PAM type: YTN; PAM sequence: TTG
gtcacacacaccctgatgtg

SEQ ID NO: 27142 - DNA, 20 bp, Artificial Sequence
  Description of Artificial Sequence: Synthetic oligonucleotide
  Target: COL7A1; (-) strand; PAM type: YTN; PAM sequence: TTT
ggtcacacacaccctgatgt

SEQ ID NO: 27143 - DNA, 20 bp, Artificial Sequence
  Description of Artificial Sequence: Synthetic oligonucleotide
  Target: COL7A1; (-) strand; PAM type: YTN; PAM sequence: CTA
atagatagggtttggtcaca

SEQ ID NO: 27144 - DNA, 20 bp, Artificial Sequence
  Description of Artificial Sequence: Synthetic oligonucleotide
  Target: COL7A1; (-) strand; PAM type: YTN; PAM sequence: CTC
cctaatagatagggtttggt

SEQ ID NO: 27145 - DNA, 20 bp, Artificial Sequence
  Description of Artificial Sequence: Synthetic oligonucleotide
  Target: COL7A1; (-) strand; PAM type: YTN; PAM sequence: CTG
actccctaatagatagggtt

SEQ ID NO: 27146 - DNA, 20 bp, Artificial Sequence
  Description of Artificial Sequence: Synthetic oligonucleotide
  Target: COL7A1; (-) strand; PAM type: YTN; PAM sequence: CTG
ctgactccctaatagatagg

SEQ ID NO: 27147 - DNA, 20 bp, Artificial Sequence
  Description of Artificial Sequence: Synthetic oligonucleotide
  Target: COL7A1; (-) strand; PAM type: YTN; PAM sequence: CTG
ccatcactgctgactcccta

SEQ ID NO: 27148 - DNA, 20 bp, Artificial Sequence
  Description of Artificial Sequence: Synthetic oligonucleotide
  Target: COL7A1; (-) strand; PAM type: YTN; PAM sequence: CTA
tcctgccatcactgctgact

SEQ ID NO: 27149 - DNA, 20 bp, Artificial Sequence
  Description of Artificial Sequence: Synthetic oligonucleotide
  Target: COL7A1; (-) strand; PAM type: YTN; PAM sequence: CTC
cctatcctgccatcactgct

SEQ ID NO: 27150 - DNA, 20 bp, Artificial Sequence
  Description of Artificial Sequence: Synthetic oligonucleotide
  Target: COL7A1; (-) strand; PAM type: YTN; PAM sequence: CTG
gctccctatcctgccatcac

SEQ ID NO: 27151 - DNA, 20 bp, Artificial Sequence
  Description of Artificial Sequence: Synthetic oligonucleotide
  Target: COL7A1; (-) strand; PAM type: YTN; PAM sequence: CTG
cctggctccctatcctgcca

SEQ ID NO: 27152 - DNA, 20 bp, Artificial Sequence
  Description of Artificial Sequence: Synthetic oligonucleotide
  Target: COL7A1; (-) strand; PAM type: YTN; PAM sequence: CTA
ctgcctggctccctatcctg

SEQ ID NO: 27153 - DNA, 20 bp, Artificial Sequence
  Description of Artificial Sequence: Synthetic oligonucleotide
  Target: COL7A1; (-) strand; PAM type: YTN; PAM sequence: CTC
acctactgcctggctcccta

SEQ ID NO: 27154 - DNA, 20 bp, Artificial Sequence
  Description of Artificial Sequence: Synthetic oligonucleotide
  Target: COL7A1; (-) strand; PAM type: YTN; PAM sequence: CTC
cagacctcacctactgcctg

SEQ ID NO: 27155 - DNA, 20 bp, Artificial Sequence
  Description of Artificial Sequence: Synthetic oligonucleotide
  Target: COL7A1; (-) strand; PAM type: YTN; PAM sequence: CTC
acaggctccagacctcacct

SEQ ID NO: 27156 - DNA, 20 bp, Artificial Sequence
  Description of Artificial Sequence: Synthetic oligonucleotide
  Target: COL7A1; (-) strand; PAM type: YTN; PAM sequence: CTC
tcacaggctccagacctcac

SEQ ID NO: 27157 - DNA, 20 bp, Artificial Sequence
  Description of Artificial Sequence: Synthetic oligonucleotide
  Target: COL7A1; (-) strand; PAM type: YTN; PAM sequence: CTC
tctcacaggctccagacctc

SEQ ID NO: 27158 - DNA, 20 bp, Artificial Sequence
  Description of Artificial Sequence: Synthetic oligonucleotide
  Target: COL7A1; (-) strand; PAM type: YTN; PAM sequence: CTC
ccagctctctcacaggctcc

SEQ ID NO: 27159 - DNA, 20 bp, Artificial Sequence
  Description of Artificial Sequence: Synthetic oligonucleotide
  Target: COL7A1; (-) strand; PAM type: YTN; PAM sequence: TTC
tcccagctctctcacaggct

SEQ ID NO: 27160 - DNA, 20 bp, Artificial Sequence
  Description of Artificial Sequence: Synthetic oligonucleotide
  Target: COL7A1; (-) strand; PAM type: YTN; PAM sequence: TTC
aggcattctcccagctctct

SEQ ID NO: 27161 - DNA, 20 bp, Artificial Sequence
  Description of Artificial Sequence: Synthetic oligonucleotide
  Target: COL7A1; (-) strand; PAM type: YTN; PAM sequence: CTG
accacccaataggttcaggc

SEQ ID NO: 27162 - DNA, 20 bp, Artificial Sequence
  Description of Artificial Sequence: Synthetic oligonucleotide
  Target: COL7A1; (-) strand; PAM type: YTN; PAM sequence: CTC
ctgaccacccaataggttca

SEQ ID NO: 27163 - DNA, 20 bp, Artificial Sequence
  Description of Artificial Sequence: Synthetic oligonucleotide
  Target: COL7A1; (-) strand; PAM type: YTN; PAM sequence: TTA
ccatctcctgaccacccaat

SEQ ID NO: 27164 - DNA, 20 bp, Artificial Sequence
  Description of Artificial Sequence: Synthetic oligonucleotide
  Target: COL7A1; (-) strand; PAM type: YTN; PAM sequence: CTC
cataccagttaccatctcct

SEQ ID NO: 27165 - DNA, 20 bp, Artificial Sequence
  Description of Artificial Sequence: Synthetic oligonucleotide
  Target: COL7A1; (-) strand; PAM type: YTN; PAM sequence: CTG
aggccccccacccaggctcc

SEQ ID NO: 27166 - DNA, 20 bp, Artificial Sequence
  Description of Artificial Sequence: Synthetic oligonucleotide
  Target: COL7A1; (-) strand; PAM type: YTN; PAM sequence: CTC
cctgaggccccccacccagg

SEQ ID NO: 27167 - DNA, 20 bp, Artificial Sequence
  Description of Artificial Sequence: Synthetic oligonucleotide
  Target: COL7A1; (-) strand; PAM type: YTN; PAM sequence: CTC
tccctgaggccccccaccca

SEQ ID NO: 27168 - DNA, 20 bp, Artificial Sequence
  Description of Artificial Sequence: Synthetic oligonucleotide
  Target: COL7A1; (-) strand; PAM type: YTN; PAM sequence: CTA
cctctccctgaggcccccca

SEQ ID NO: 27169 - DNA, 20 bp, Artificial Sequence
  Description of Artificial Sequence: Synthetic oligonucleotide
  Target: COL7A1; (-) strand; PAM type: YTN; PAM sequence: TTC
tacctctccctgaggccccc

SEQ ID NO: 27170 - DNA, 20 bp, Artificial Sequence
  Description of Artificial Sequence: Synthetic oligonucleotide
  Target: COL7A1; (-) strand; PAM type: YTN; PAM sequence: CTG
gggcagccagattctacctc

SEQ ID NO: 27171 - DNA, 20 bp, Artificial Sequence
  Description of Artificial Sequence: Synthetic oligonucleotide
  Target: COL7A1; (-) strand; PAM type: YTN; PAM sequence: TTG
gccctggggcagccagattc

SEQ ID NO: 27172 - DNA, 20 bp, Artificial Sequence
  Description of Artificial Sequence: Synthetic oligonucleotide
  Target: COL7A1; (-) strand; PAM type: YTN; PAM sequence: TTT
ggccctggggcagccagatt

SEQ ID NO: 27173 - DNA, 20 bp, Artificial Sequence
  Description of Artificial Sequence: Synthetic oligonucleotide
  Target: COL7A1; (-) strand; PAM type: YTN; PAM sequence: TTC
aggtttggccctggggcagc

SEQ ID NO: 27174 - DNA, 20 bp, Artificial Sequence
  Description of Artificial Sequence: Synthetic oligonucleotide
  Target: COL7A1; (-) strand; PAM type: YTN; PAM sequence: TTG
ggccacaggcagttcaggtt

SEQ ID NO: 27175 - DNA, 20 bp, Artificial Sequence
  Description of Artificial Sequence: Synthetic oligonucleotide
  Target: COL7A1; (-) strand; PAM type: YTN; PAM sequence: CTT
gggccacaggcagttcaggt

SEQ ID NO: 27176 - DNA, 20 bp, Artificial Sequence
  Description of Artificial Sequence: Synthetic oligonucleotide
  Target: COL7A1; (-) strand; PAM type: YTN; PAM sequence: CTC
ttgggccacaggcagttcag

SEQ ID NO: 27177 - DNA, 20 bp, Artificial Sequence
  Description of Artificial Sequence: Synthetic oligonucleotide
  Target: COL7A1; (-) strand; PAM type: YTN; PAM sequence: TTG
ggcctcttgggccacaggca

SEQ ID NO: 27178 - DNA, 20 bp, Artificial Sequence
  Description of Artificial Sequence: Synthetic oligonucleotide
  Target: COL7A1; (-) strand; PAM type: YTN; PAM sequence: CTT
gggcctcttgggccacaggc

SEQ ID NO: 27179 - DNA, 20 bp, Artificial Sequence
  Description of Artificial Sequence: Synthetic oligonucleotide
  Target: COL7A1; (-) strand; PAM type: YTN; PAM sequence: TTG
gcacttgggcctcttgggcc

SEQ ID NO: 27180 - DNA, 20 bp, Artificial Sequence
  Description of Artificial Sequence: Synthetic oligonucleotide
  Target: COL7A1; (-) strand; PAM type: YTN; PAM sequence: CTG
gtgttggcacttgggcctct

SEQ ID NO: 27181 - DNA, 20 bp, Artificial Sequence
  Description of Artificial Sequence: Synthetic oligonucleotide
  Target: COL7A1; (-) strand; PAM type: YTN; PAM sequence: CTG
gagcgtctggtgttggcact

SEQ ID NO: 27182 - DNA, 20 bp, Artificial Sequence
  Description of Artificial Sequence: Synthetic oligonucleotide
  Target: COL7A1; (-) strand; PAM type: YTN; PAM sequence: CTA
cgaggagggtcctggagcgt

SEQ ID NO: 27183 - DNA, 20 bp, Artificial Sequence
  Description of Artificial Sequence: Synthetic oligonucleotide
  Target: COL7A1; (-) strand; PAM type: YTN; PAM sequence: CTC
accgtgcggaggctacgagg

SEQ ID NO: 27184 - DNA, 20 bp, Artificial Sequence
  Description of Artificial Sequence: Synthetic oligonucleotide
  Target: COL7A1; (-) strand; PAM type: YTN; PAM sequence: CTC
aagacaatgctcaccgtgcg

SEQ ID NO: 27185 - DNA, 20 bp, Artificial Sequence
  Description of Artificial Sequence: Synthetic oligonucleotide
  Target: COL7A1; (-) strand; PAM type: YTN; PAM sequence: CTA
ccacatgccactcaagacaa

SEQ ID NO: 27186 - DNA, 20 bp, Artificial Sequence
  Description of Artificial Sequence: Synthetic oligonucleotide
  Target: COL7A1; (-) strand; PAM type: YTN; PAM sequence: TTC
ctaccacatgccactcaaga

SEQ ID NO: 27187 - DNA, 20 bp, Artificial Sequence
  Description of Artificial Sequence: Synthetic oligonucleotide
  Target: COL7A1; (-) strand; PAM type: YTN; PAM sequence: CTG
gcggatgtggtgttcctacc

SEQ ID NO: 27188 - DNA, 20 bp, Artificial Sequence
  Description of Artificial Sequence: Synthetic oligonucleotide
  Target: COL7A1; (-) strand; PAM type: YTN; PAM sequence: CTA
cagtgtgcccccgtggcctg

SEQ ID NO: 27189 - DNA, 20 bp, Artificial Sequence
  Description of Artificial Sequence: Synthetic oligonucleotide
  Target: COL7A1; (-) strand; PAM type: YTN; PAM sequence: TTC
ctacagtgtgcccccgtggc

SEQ ID NO: 27190 - DNA, 20 bp, Artificial Sequence
  Description of Artificial Sequence: Synthetic oligonucleotide
  Target: COL7A1; (-) strand; PAM type: YTN; PAM sequence: CTT
cctacagtgtgcccccgtgg

SEQ ID NO: 27191 - DNA, 20 bp, Artificial Sequence
  Description of Artificial Sequence: Synthetic oligonucleotide
  Target: COL7A1; (-) strand; PAM type: YTN; PAM sequence: TTC
cccttcctacagtgtgcccc

SEQ ID NO: 27192 - DNA, 20 bp, Artificial Sequence
  Description of Artificial Sequence: Synthetic oligonucleotide
  Target: COL7A1; (-) strand; PAM type: YTN; PAM sequence: TTG
ttccccttcctacagtgtgc

SEQ ID NO: 27193 - DNA, 20 bp, Artificial Sequence
  Description of Artificial Sequence: Synthetic oligonucleotide
  Target: COL7A1; (-) strand; PAM type: YTN; PAM sequence: CTT
gttccccttcctacagtgtg

SEQ ID NO: 27194 - DNA, 20 bp, Artificial Sequence
  Description of Artificial Sequence: Synthetic oligonucleotide
  Target: COL7A1; (-) strand; PAM type: YTN; PAM sequence: TTC
agtaacttgttccccttcct

SEQ ID NO: 27195 - DNA, 20 bp, Artificial Sequence
  Description of Artificial Sequence: Synthetic oligonucleotide
  Target: COL7A1; (-) strand; PAM type: YTN; PAM sequence: CTT
cagtaacttgttccccttcc

SEQ ID NO: 27196 - DNA, 20 bp, Artificial Sequence
  Description of Artificial Sequence: Synthetic oligonucleotide
  Target: COL7A1; (-) strand; PAM type: YTN; PAM sequence: CTG
cccgcttcagtaacttgttc

SEQ ID NO: 27197 - DNA, 20 bp, Artificial Sequence
  Description of Artificial Sequence: Synthetic oligonucleotide
  Target: COL7A1; (-) strand; PAM type: YTN; PAM sequence: CTG
ggtgggctgcccgcttcagt

SEQ ID NO: 27198 - DNA, 20 bp, Artificial Sequence
  Description of Artificial Sequence: Synthetic oligonucleotide
  Target: COL7A1; (-) strand; PAM type: YTN; PAM sequence: CTG
tcacacagacgccaggtata

SEQ ID NO: 27199 - DNA, 20 bp, Artificial Sequence
  Description of Artificial Sequence: Synthetic oligonucleotide
  Target: COL7A1; (-) strand; PAM type: YTN; PAM sequence: CTG
aggcatctgtcacacagacg

SEQ ID NO: 27200 - DNA, 20 bp, Artificial Sequence
  Description of Artificial Sequence: Synthetic oligonucleotide
  Target: COL7A1; (-) strand; PAM type: YTN; PAM sequence: CTG
gatggtgtgcggggtcctga

SEQ ID NO: 27201 - DNA, 20 bp, Artificial Sequence
  Description of Artificial Sequence: Synthetic oligonucleotide
  Target: COL7A1; (-) strand; PAM type: YTN; PAM sequence: CTG
tcctggatggtgtgcggggt

SEQ ID NO: 27202 - DNA, 20 bp, Artificial Sequence
  Description of Artificial Sequence: Synthetic oligonucleotide
  Target: COL7A1; (-) strand; PAM type: YTN; PAM sequence: CTG
acgcctgtcctggatggtgt

SEQ ID NO: 27203 - DNA, 20 bp, Artificial Sequence
  Description of Artificial Sequence: Synthetic oligonucleotide
  Target: COL7A1; (-) strand; PAM type: YTN; PAM sequence: CTC
cctgacgcctgtcctggatg

SEQ ID NO: 27204 - DNA, 20 bp, Artificial Sequence
  Description of Artificial Sequence: Synthetic oligonucleotide
  Target: COL7A1; (-) strand; PAM type: YTN; PAM sequence: TTC
tccctgacgcctgtcctgga

SEQ ID NO: 27205 - DNA, 20 bp, Artificial Sequence
  Description of Artificial Sequence: Synthetic oligonucleotide
  Target: COL7A1; (-) strand; PAM type: YTN; PAM sequence: CTT
ctccctgacgcctgtcctgg

SEQ ID NO: 27206 - DNA, 20 bp, Artificial Sequence
  Description of Artificial Sequence: Synthetic oligonucleotide
  Target: COL7A1; (-) strand; PAM type: YTN; PAM sequence: TTA
catcttctccctgacgcctg

SEQ ID NO: 27207 - DNA, 20 bp, Artificial Sequence
  Description of Artificial Sequence: Synthetic oligonucleotide
  Target: COL7A1; (-) strand; PAM type: YTN; PAM sequence: CTT
acatcttctccctgacgcct

SEQ ID NO: 27208 - DNA, 20 bp, Artificial Sequence
  Description of Artificial Sequence: Synthetic oligonucleotide
  Target: COL7A1; (-) strand; PAM type: YTN; PAM sequence: CTC
ttacatcttctccctgacgc

SEQ ID NO: 27209 - DNA, 20 bp, Artificial Sequence
  Description of Artificial Sequence: Synthetic oligonucleotide
  Target: COL7A1; (-) strand; PAM type: YTN; PAM sequence: CTG
gcgtctcttacatcttctcc

SEQ ID NO: 27210 - DNA, 20 bp, Artificial Sequence
  Description of Artificial Sequence: Synthetic oligonucleotide
  Target: COL7A1; (-) strand; PAM type: YTN; PAM sequence: CTA
gagcctggcgtctcttacat

SEQ ID NO: 27211 - DNA, 20 bp, Artificial Sequence
  Description of Artificial Sequence: Synthetic oligonucleotide
  Target: COL7A1; (-) strand; PAM type: YTN; PAM sequence: CTC
ccagcgggtgacagggctag

SEQ ID NO: 27212 - DNA, 20 bp, Artificial Sequence
  Description of Artificial Sequence: Synthetic oligonucleotide
  Target: COL7A1; (-) strand; PAM type: YTN; PAM sequence: CTC
aagctcccagcgggtgacag

SEQ ID NO: 27213 - DNA, 20 bp, Artificial Sequence
  Description of Artificial Sequence: Synthetic oligonucleotide
  Target: COL7A1; (-) strand; PAM type: YTN; PAM sequence: TTC
cagggatctcaagctcccag

SEQ ID NO: 27214 - DNA, 20 bp, Artificial Sequence
  Description of Artificial Sequence: Synthetic oligonucleotide
  Target: COL7A1; (-) strand; PAM type: YTN; PAM sequence: CTT
ccagggatctcaagctccca

SEQ ID NO: 27215 - DNA, 20 bp, Artificial Sequence
  Description of Artificial Sequence: Synthetic oligonucleotide
  Target: COL7A1; (-) strand; PAM type: YTN; PAM sequence: CTG
ggtccccgcagacacttcca

SEQ ID NO: 27216 - DNA, 20 bp, Artificial Sequence
  Description of Artificial Sequence: Synthetic oligonucleotide
  Target: COL7A1; (-) strand; PAM type: YTN; PAM sequence: CTG
cagaagtgcctgggtccccg

SEQ ID NO: 27217 - DNA, 20 bp, Artificial Sequence
  Description of Artificial Sequence: Synthetic oligonucleotide
  Target: COL7A1; (-) strand; PAM type: YTN; PAM sequence: CTC
ctgcagaagtgcctgggtcc

SEQ ID NO: 27218 - DNA, 20 bp, Artificial Sequence
  Description of Artificial Sequence: Synthetic oligonucleotide
  Target: COL7A1; (-) strand; PAM type: YTN; PAM sequence: CTG
tctcctgcagaagtgcctgg

SEQ ID NO: 27219 - DNA, 20 bp, Artificial Sequence
  Description of Artificial Sequence: Synthetic oligonucleotide
  Target: COL7A1; (-) strand; PAM type: YTN; PAM sequence: TTC
tgtctcctgcagaagtgcct

SEQ ID NO: 27220 - DNA, 20 bp, Artificial Sequence
  Description of Artificial Sequence: Synthetic oligonucleotide
  Target: COL7A1; (-) strand; PAM type: YTN; PAM sequence: TTA
atcaagttctgtctcctgca

SEQ ID NO: 27221 - DNA, 20 bp, Artificial Sequence
  Description of Artificial Sequence: Synthetic oligonucleotide
  Target: COL7A1; (-) strand; PAM type: YTN; PAM sequence: TTT
aatcaagttctgtctcctgc

SEQ ID NO: 27222 - DNA, 20 bp, Artificial Sequence
  Description of Artificial Sequence: Synthetic oligonucleotide
  Target: COL7A1; (-) strand; PAM type: YTN; PAM sequence: TTT
taatcaagttctgtctcctg

SEQ ID NO: 27223 - DNA, 20 bp, Artificial Sequence
  Description of Artificial Sequence: Synthetic oligonucleotide
  Target: COL7A1; (-) strand; PAM type: YTN; PAM sequence: TTT
ttaatcaagttctgtctcct

SEQ ID NO: 27224 - DNA, 20 bp, Artificial Sequence
  Description of Artificial Sequence: Synthetic oligonucleotide
  Target: COL7A1; (-) strand; PAM type: YTN; PAM sequence: CTT
tttaatcaagttctgtctcc

SEQ ID NO: 27225 - DNA, 20 bp, Artificial Sequence
  Description of Artificial Sequence: Synthetic oligonucleotide
  Target: COL7A1; (-) strand; PAM type: YTN; PAM sequence: CTG
tggagacagctttttaatca

SEQ ID NO: 27226 - DNA, 20 bp, Artificial Sequence
  Description of Artificial Sequence: Synthetic oligonucleotide
  Target: COL7A1; (-) strand; PAM type: YTN; PAM sequence: CTC
tgtggagacagctttttaat

SEQ ID NO: 27227 - DNA, 20 bp, Artificial Sequence
  Description of Artificial Sequence: Synthetic oligonucleotide
  Target: COL7A1; (-) strand; PAM type: YTN; PAM sequence: TTG
gggctctgtggagacagctt

SEQ ID NO: 27228 - DNA, 20 bp, Artificial Sequence
  Description of Artificial Sequence: Synthetic oligonucleotide
  Target: COL7A1; (-) strand; PAM type: YTN; PAM sequence: CTG
gcagttggggctctgtggag

SEQ ID NO: 27229 - DNA, 20 bp, Artificial Sequence
  Description of Artificial Sequence: Synthetic oligonucleotide
  Target: COL7A1; (-) strand; PAM type: YTN; PAM sequence: TTG
ggtgggctggcagttggggc

SEQ ID NO: 27230 - DNA, 20 bp, Artificial Sequence
  Description of Artificial Sequence: Synthetic oligonucleotide
  Target: COL7A1; (-) strand; PAM type: YTN; PAM sequence: TTT
gggtgggctggcagttgggg

SEQ ID NO: 27231 - DNA, 20 bp, Artificial Sequence
  Description of Artificial Sequence: Synthetic oligonucleotide
  Target: COL7A1; (-) strand; PAM type: YTN; PAM sequence: CTG
gccagggtgagggggaggcc

SEQ ID NO: 27232 - DNA, 20 bp, Artificial Sequence
  Description of Artificial Sequence: Synthetic oligonucleotide
  Target: COL7A1; (-) strand; PAM type: YTN; PAM sequence: CTC
agaggccctggccagggtga

SEQ ID NO: 27233 - DNA, 20 bp, Artificial Sequence
  Description of Artificial Sequence: Synthetic oligonucleotide
  Target: COL7A1; (-) strand; PAM type: YTN; PAM sequence: CTG
gcggccactcagaggccctg

SEQ ID NO: 27234 - DNA, 20 bp, Artificial Sequence
  Description of Artificial Sequence: Synthetic oligonucleotide
  Target: COL7A1; (-) strand; PAM type: YTN; PAM sequence: CTA
tcctggcggccactcagagg

SEQ ID NO: 27235 - DNA, 20 bp, Artificial Sequence
  Description of Artificial Sequence: Synthetic oligonucleotide
  Target: COL7A1; (-) strand; PAM type: YTN; PAM sequence: CTA
catcctatcctggcggccac

SEQ ID NO: 27236 - DNA, 20 bp, Artificial Sequence
  Description of Artificial Sequence: Synthetic oligonucleotide
  Target: COL7A1; (-) strand; PAM type: YTN; PAM sequence: CTC
cagtgtccagggcatccagc

SEQ ID NO: 27237 - DNA, 20 bp, Artificial Sequence
  Description of Artificial Sequence: Synthetic oligonucleotide
  Target: COL7A1; (-) strand; PAM type: YTN; PAM sequence: CTG
gactccagtgtccagggcat

SEQ ID NO: 27238 - DNA, 20 bp, Artificial Sequence
  Description of Artificial Sequence: Synthetic oligonucleotide
  Target: COL7A1; (-) strand; PAM type: YTN; PAM sequence: TTG
gcctggactccagtgtccag

SEQ ID NO: 27239 - DNA, 20 bp, Artificial Sequence
  Description of Artificial Sequence: Synthetic oligonucleotide
  Target: COL7A1; (-) strand; PAM type: YTN; PAM sequence: TTT
ggcctggactccagtgtcca

SEQ ID NO: 27240 - DNA, 20 bp, Artificial Sequence
  Description of Artificial Sequence: Synthetic oligonucleotide
  Target: COL7A1; (-) strand; PAM type: YTN; PAM sequence: CTT
tggcctggactccagtgtcc

SEQ ID NO: 27241 - DNA, 20 bp, Artificial Sequence
  Description of Artificial Sequence: Synthetic oligonucleotide
  Target: COL7A1; (-) strand; PAM type: YTN; PAM sequence: CTC
ggtgactttggcctggactc

SEQ ID NO: 27242 - DNA, 20 bp, Artificial Sequence
  Description of Artificial Sequence: Synthetic oligonucleotide
  Target: COL7A1; (-) strand; PAM type: YTN; PAM sequence: CTC
gatcgactcggtgactttgg

SEQ ID NO: 27243 - DNA, 20 bp, Artificial Sequence
  Description of Artificial Sequence: Synthetic oligonucleotide
  Target: COL7A1; (-) strand; PAM type: YTN; PAM sequence: CTA
cgtgtggtggacacctcgat

SEQ ID NO: 27244 - DNA, 20 bp, Artificial Sequence
  Description of Artificial Sequence: Synthetic oligonucleotide
  Target: COL7A1; (-) strand; PAM type: YTN; PAM sequence: TTG
aactacgtgtggtggacacc

SEQ ID NO: 27245 - DNA, 20 bp, Artificial Sequence
  Description of Artificial Sequence: Synthetic oligonucleotide
  Target: COL7A1; (-) strand; PAM type: YTN; PAM sequence: TTC
caagcattgaactacgtgtg

SEQ ID NO: 27246 - DNA, 20 bp, Artificial Sequence
  Description of Artificial Sequence: Synthetic oligonucleotide
  Target: COL7A1; (-) strand; PAM type: YTN; PAM sequence: CTC
gtgttccaagcattgaacta

SEQ ID NO: 27247 - DNA, 20 bp, Artificial Sequence
  Description of Artificial Sequence: Synthetic oligonucleotide
  Target: COL7A1; (-) strand; PAM type: YTN; PAM sequence: TTC
agagtcacctcgtgttccaa

SEQ ID NO: 27248 - DNA, 20 bp, Artificial Sequence
  Description of Artificial Sequence: Synthetic oligonucleotide
  Target: COL7A1; (-) strand; PAM type: YTN; PAM sequence: CTT
cagagtcacctcgtgttcca

SEQ ID NO: 27249 - DNA, 20 bp, Artificial Sequence
  Description of Artificial Sequence: Synthetic oligonucleotide
  Target: COL7A1; (-) strand; PAM type: YTN; PAM sequence: CTC
cttcagagtcacctcgtgtt

SEQ ID NO: 27250 - DNA, 20 bp, Artificial Sequence
  Description of Artificial Sequence: Synthetic oligonucleotide
  Target: COL7A1; (-) strand; PAM type: YTN; PAM sequence: TTC
ctccttcagagtcacctcgt

SEQ ID NO: 27251 - DNA, 20 bp, Artificial Sequence
  Description of Artificial Sequence: Synthetic oligonucleotide
  Target: COL7A1; (-) strand; PAM type: YTN; PAM sequence: TTC
attcctccttcagagtcacc

SEQ ID NO: 27252 - DNA, 20 bp, Artificial Sequence
  Description of Artificial Sequence: Synthetic oligonucleotide
  Target: COL7A1; (-) strand; PAM type: YTN; PAM sequence: TTT
cattcctccttcagagtcac

SEQ ID NO: 27253 - DNA, 20 bp, Artificial Sequence
  Description of Artificial Sequence: Synthetic oligonucleotide
  Target: COL7A1; (-) strand; PAM type: YTN; PAM sequence: CTT
tcattcctccttcagagtca

SEQ ID NO: 27254 - DNA, 20 bp, Artificial Sequence
  Description of Artificial Sequence: Synthetic oligonucleotide
  Target: COL7A1; (-) strand; PAM type: YTN; PAM sequence: CTC
gatctttcattcctccttca

SEQ ID NO: 27255 - DNA, 20 bp, Artificial Sequence
  Description of Artificial Sequence: Synthetic oligonucleotide
  Target: COL7A1; (-) strand; PAM type: YTN; PAM sequence: CTG
atcctcgatctttcattcct

SEQ ID NO: 27256 - DNA, 20 bp, Artificial Sequence
  Description of Artificial Sequence: Synthetic oligonucleotide
  Target: COL7A1; (-) strand; PAM type: YTN; PAM sequence: CTC
tgatcctcgatctttcattc

SEQ ID NO: 27257 - DNA, 20 bp, Artificial Sequence
  Description of Artificial Sequence: Synthetic oligonucleotide
  Target: COL7A1; (-) strand; PAM type: YTN; PAM sequence: CTC
agcctctgatcctcgatctt

SEQ ID NO: 27258 - DNA, 20 bp, Artificial Sequence
  Description of Artificial Sequence: Synthetic oligonucleotide
  Target: COL7A1; (-) strand; PAM type: YTN; PAM sequence: CTC
aggactcagcctctgatcct

SEQ ID NO: 27259 - DNA, 20 bp, Artificial Sequence
  Description of Artificial Sequence: Synthetic oligonucleotide
  Target: COL7A1; (-) strand; PAM type: YTN; PAM sequence: TTC
tcaggactcagcctctgatc

SEQ ID NO: 27260 - DNA, 20 bp, Artificial Sequence
  Description of Artificial Sequence: Synthetic oligonucleotide
  Target: COL7A1; (-) strand; PAM type: YTN; PAM sequence: CTG
ggttctcaggactcagcctc

SEQ ID NO: 27261 - DNA, 20 bp, Artificial Sequence
  Description of Artificial Sequence: Synthetic oligonucleotide
  Target: COL7A1; (-) strand; PAM type: YTN; PAM sequence: TTC
tgggttctcaggactcagcc

SEQ ID NO: 27262 - DNA, 20 bp, Artificial Sequence
  Description of Artificial Sequence: Synthetic oligonucleotide
  Target: COL7A1; (-) strand; PAM type: YTN; PAM sequence: CTT
ctgggttctcaggactcagc

SEQ ID NO: 27263 - DNA, 20 bp, Artificial Sequence
  Description of Artificial Sequence: Synthetic oligonucleotide
  Target: COL7A1; (-) strand; PAM type: YTN; PAM sequence: CTC
ccttctgggttctcaggact

SEQ ID NO: 27264 - DNA, 20 bp, Artificial Sequence
  Description of Artificial Sequence: Synthetic oligonucleotide
  Target: COL7A1; (-) strand; PAM type: YTN; PAM sequence: CTC
tcccttctgggttctcagga

SEQ ID NO: 27265 - DNA, 20 bp, Artificial Sequence
  Description of Artificial Sequence: Synthetic oligonucleotide
  Target: COL7A1; (-) strand; PAM type: YTN; PAM sequence: CTC
agatctctcccttctgggtt

SEQ ID NO: 27266 - DNA, 20 bp, Artificial Sequence
  Description of Artificial Sequence: Synthetic oligonucleotide
  Target: COL7A1; (-) strand; PAM type: YTN; PAM sequence: TTC
aataagacaaaccggaccca

SEQ ID NO: 27267 - DNA, 20 bp, Artificial Sequence
  Description of Artificial Sequence: Synthetic oligonucleotide
  Target: COL7A1; (-) strand; PAM type: YTN; PAM sequence: CTT
caataagacaaaccggaccc

SEQ ID NO: 27268 - DNA, 20 bp, Artificial Sequence
  Description of Artificial Sequence: Synthetic oligonucleotide
  Target: COL7A1; (-) strand; PAM type: YTN; PAM sequence: CTC
ccatgatgcttcaataagac

SEQ ID NO: 27269 - DNA, 20 bp, Artificial Sequence
  Description of Artificial Sequence: Synthetic oligonucleotide
  Target: COL7A1; (-) strand; PAM type: YTN; PAM sequence: CTG
ggtgaccccagcatgacctc

SEQ ID NO: 27270 - DNA, 20 bp, Artificial Sequence
  Description of Artificial Sequence: Synthetic oligonucleotide
  Target: COL7A1; (-) strand; PAM type: YTN; PAM sequence: CTG
accctgggtgaccccagcat

SEQ ID NO: 27271 - DNA, 20 bp, Artificial Sequence
  Description of Artificial Sequence: Synthetic oligonucleotide
  Target: COL7A1; (-) strand; PAM type: YTN; PAM sequence: CTC
tgaccctgggtgaccccagc

SEQ ID NO: 27272 - DNA, 20 bp, Artificial Sequence
  Description of Artificial Sequence: Synthetic oligonucleotide
  Target: COL7A1; (-) strand; PAM type: YTN; PAM sequence: CTC
accctctgaccctgggtgac

SEQ ID NO: 27273 - DNA, 20 bp, Artificial Sequence
  Description of Artificial Sequence: Synthetic oligonucleotide
  Target: COL7A1; (-) strand; PAM type: YTN; PAM sequence: CTA
cccctcaccctctgaccctg

SEQ ID NO: 27274 - DNA, 20 bp, Artificial Sequence
  Description of Artificial Sequence: Synthetic oligonucleotide
  Target: COL7A1; (-) strand; PAM type: YTN; PAM sequence: CTG
tacccctacccctcaccctc

SEQ ID NO: 27275 - DNA, 20 bp, Artificial Sequence
  Description of Artificial Sequence: Synthetic oligonucleotide
  Target: COL7A1; (-) strand; PAM type: YTN; PAM sequence: CTC
ctgtacccctacccctcacc

SEQ ID NO: 27276 - DNA, 20 bp, Artificial Sequence
  Description of Artificial Sequence: Synthetic oligonucleotide
  Target: COL7A1; (-) strand; PAM type: YTN; PAM sequence: CTC
ctcctgtacccctacccctc

SEQ ID NO: 27277 - DNA, 20 bp, Artificial Sequence
  Description of Artificial Sequence: Synthetic oligonucleotide
  Target: COL7A1; (-) strand; PAM type: YTN; PAM sequence: CTG
agtgactcctcctgtacccc

SEQ ID NO: 27278 - DNA, 20 bp, Artificial Sequence
  Description of Artificial Sequence: Synthetic oligonucleotide
  Target: COL7A1; (-) strand; PAM type: YTN; PAM sequence: CTC
tgagtgactcctcctgtacc

SEQ ID NO: 27279 - DNA, 20 bp, Artificial Sequence
  Description of Artificial Sequence: Synthetic oligonucleotide
  Target: COL7A1; (-) strand; PAM type: YTN; PAM sequence: CTG
caccccgactctgagtgact

SEQ ID NO: 27280 - DNA, 20 bp, Artificial Sequence
  Description of Artificial Sequence: Synthetic oligonucleotide
  Target: COL7A1; (-) strand; PAM type: YTN; PAM sequence: TTC
ctgcaccccgactctgagtg

SEQ ID NO: 27281 - DNA, 20 bp, Artificial Sequence
  Description of Artificial Sequence: Synthetic oligonucleotide
  Target: COL7A1; (-) strand; PAM type: YTN; PAM sequence: CTT
cctgcaccccgactctgagt

SEQ ID NO: 27282 - DNA, 20 bp, Artificial Sequence
  Description of Artificial Sequence: Synthetic oligonucleotide
  Target: COL7A1; (-) strand; PAM type: YTN; PAM sequence: CTG
acttcctgcaccccgactct

SEQ ID NO: 27283 - DNA, 20 bp, Artificial Sequence
  Description of Artificial Sequence: Synthetic oligonucleotide
  Target: COL7A1; (-) strand; PAM type: YTN; PAM sequence: CTG
atgacccaccctgacttcct

SEQ ID NO: 27284 - DNA, 20 bp, Artificial Sequence
  Description of Artificial Sequence: Synthetic oligonucleotide
  Target: COL7A1; (-) strand; PAM type: YTN; PAM sequence: CTG
ctgatgacccaccctgactt

SEQ ID NO: 27285 - DNA, 20 bp, Artificial Sequence
  Description of Artificial Sequence: Synthetic oligonucleotide
  Target: COL7A1; (-) strand; PAM type: YTN; PAM sequence: CTC
ccctgctgatgacccaccct

SEQ ID NO: 27286 - DNA, 20 bp, Artificial Sequence
  Description of Artificial Sequence: Synthetic oligonucleotide
  Target: COL7A1; (-) strand; PAM type: YTN; PAM sequence: CTC
ctcccctgctgatgacccac

SEQ ID NO: 27287 - DNA, 20 bp, Artificial Sequence
  Description of Artificial Sequence: Synthetic oligonucleotide
  Target: COL7A1; (-) strand; PAM type: YTN; PAM sequence: TTG
gcgtgctcctcccctgctga

SEQ ID NO: 27288 - DNA, 20 bp, Artificial Sequence
  Description of Artificial Sequence: Synthetic oligonucleotide
  Target: COL7A1; (-) strand; PAM type: YTN; PAM sequence: CTT
ggcgtgctcctcccctgctg

SEQ ID NO: 27289 - DNA, 20 bp, Artificial Sequence
  Description of Artificial Sequence: Synthetic oligonucleotide
  Target: COL7A1; (-) strand; PAM type: YTN; PAM sequence: CTC
accttggcgtgctcctcccc

SEQ ID NO: 27290 - DNA, 20 bp, Artificial Sequence
  Description of Artificial Sequence: Synthetic oligonucleotide
  Target: COL7A1; (-) strand; PAM type: YTN; PAM sequence: CTG
cctcaccttggcgtgctcct

SEQ ID NO: 27291 - DNA, 20 bp, Artificial Sequence
  Description of Artificial Sequence: Synthetic oligonucleotide
  Target: COL7A1; (-) strand; PAM type: YTN; PAM sequence: CTG
gtaagcctgcctcaccttgg

SEQ ID NO: 27292 - DNA, 20 bp, Artificial Sequence
  Description of Artificial Sequence: Synthetic oligonucleotide
  Target: COL7A1; (-) strand; PAM type: YTN; PAM sequence: CTG
cgcgcactggtaagcctgcc

SEQ ID NO: 27293 - DNA, 20 bp, Artificial Sequence
  Description of Artificial Sequence: Synthetic oligonucleotide
  Target: COL7A1; (-) strand; PAM type: YTN; PAM sequence: CTG
cagaggtgactgcgcgcact

SEQ ID NO: 27294 - DNA, 20 bp, Artificial Sequence
  Description of Artificial Sequence: Synthetic oligonucleotide
  Target: COL7A1; (-) strand; PAM type: YTN; PAM sequence: CTC
tgcagaggtgactgcgcgca

SEQ ID NO: 27295 - DNA, 20 bp, Artificial Sequence
  Description of Artificial Sequence: Synthetic oligonucleotide
  Target: COL7A1; (-) strand; PAM type: YTN; PAM sequence: CTG
gagaagggccctctgcagag

SEQ ID NO: 27296 - DNA, 20 bp, Artificial Sequence
  Description of Artificial Sequence: Synthetic oligonucleotide
  Target: COL7A1; (-) strand; PAM type: YTN; PAM sequence: CTA
gggccagctggagaagggcc

SEQ ID NO: 27297 - DNA, 20 bp, Artificial Sequence
  Description of Artificial Sequence: Synthetic oligonucleotide
  Target: COL7A1; (-) strand; PAM type: YTN; PAM sequence: CTG
agtgtcctagggccagctgg

SEQ ID NO: 27298 - DNA, 20 bp, Artificial Sequence
  Description of Artificial Sequence: Synthetic oligonucleotide
  Target: COL7A1; (-) strand; PAM type: YTN; PAM sequence: CTG
gagccagcgacacagtaccg

SEQ ID NO: 27299 - DNA, 20 bp, Artificial Sequence
  Description of Artificial Sequence: Synthetic oligonucleotide
  Target: COL7A1; (-) strand; PAM type: YTN; PAM sequence: CTG
gacgggctggagccagcgac

SEQ ID NO: 27300 - DNA, 20 bp, Artificial Sequence
  Description of Artificial Sequence: Synthetic oligonucleotide
  Target: COL7A1; (-) strand; PAM type: YTN; PAM sequence: CTA
tcacctggacgggctggagc

SEQ ID NO: 27301 - DNA, 20 bp, Artificial Sequence
  Description of Artificial Sequence: Synthetic oligonucleotide
  Target: COL7A1; (-) strand; PAM type: YTN; PAM sequence: CTC
agcagctatcacctggacgg

SEQ ID NO: 27302 - DNA, 20 bp, Artificial Sequence
  Description of Artificial Sequence: Synthetic oligonucleotide
  Target: COL7A1; (-) strand; PAM type: YTN; PAM sequence: CTG
gggcccgagctcagcagcta

SEQ ID NO: 27303 - DNA, 20 bp, Artificial Sequence
  Description of Artificial Sequence: Synthetic oligonucleotide
  Target: COL7A1; (-) strand; PAM type: YTN; PAM sequence: CTG
ccccaggtggccaggaacag

SEQ ID NO: 27304 - DNA, 20 bp, Artificial Sequence
  Description of Artificial Sequence: Synthetic oligonucleotide
  Target: COL7A1; (-) strand; PAM type: YTN; PAM sequence: CTC
acgcctgccccaggtggcca

SEQ ID NO: 27305 - DNA, 20 bp, Artificial Sequence
  Description of Artificial Sequence: Synthetic oligonucleotide
  Target: COL7A1; (-) strand; PAM type: YTN; PAM sequence: TTG
gcccccaccctcacgcctgc

SEQ ID NO: 27306 - DNA, 20 bp, Artificial Sequence
  Description of Artificial Sequence: Synthetic oligonucleotide
  Target: COL7A1; (-) strand; PAM type: YTN; PAM sequence: CTT
ggcccccaccctcacgcctg

SEQ ID NO: 27307 - DNA, 20 bp, Artificial Sequence
  Description of Artificial Sequence: Synthetic oligonucleotide
  Target: COL7A1; (-) strand; PAM type: YTN; PAM sequence: CTC
ttggcccccaccctcacgcc

SEQ ID NO: 27308 - DNA, 20 bp, Artificial Sequence
  Description of Artificial Sequence: Synthetic oligonucleotide
  Target: COL7A1; (-) strand; PAM type: YTN; PAM sequence: CTA
tcccacatgctcttggcccc

SEQ ID NO: 27309 - DNA, 20 bp, Artificial Sequence
  Description of Artificial Sequence: Synthetic oligonucleotide
  Target: COL7A1; (-) strand; PAM type: YTN; PAM sequence: TTA
atgcccccaggtgtcactat

SEQ ID NO: 27310 - DNA, 20 bp, Artificial Sequence
  Description of Artificial Sequence: Synthetic oligonucleotide
  Target: COL7A1; (-) strand; PAM type: YTN; PAM sequence: TTT
aatgcccccaggtgtcacta

SEQ ID NO: 27311 - DNA, 20 bp, Artificial Sequence
  Description of Artificial Sequence: Synthetic oligonucleotide
  Target: COL7A1; (-) strand; PAM type: YTN; PAM sequence: CTT
taatgcccccaggtgtcact

SEQ ID NO: 27312 - DNA, 20 bp, Artificial Sequence
  Description of Artificial Sequence: Synthetic oligonucleotide
  Target: COL7A1; (-) strand; PAM type: YTN; PAM sequence: TTA
acagagccagtgaagtgggc

SEQ ID NO: 27313 - DNA, 20 bp, Artificial Sequence
  Description of Artificial Sequence: Synthetic oligonucleotide
  Target: COL7A1; (-) strand; PAM type: YTN; PAM sequence: CTG
gcagggtccgtaaagtgggc

SEQ ID NO: 27314 - DNA, 20 bp, Artificial Sequence
  Description of Artificial Sequence: Synthetic oligonucleotide
  Target: COL7A1; (-) strand; PAM type: YTN; PAM sequence: TTC
atggagggtcagtctggcag

SEQ ID NO: 27315 - DNA, 20 bp, Artificial Sequence
  Description of Artificial Sequence: Synthetic oligonucleotide
  Target: COL7A1; (-) strand; PAM type: YTN; PAM sequence: CTG
cgggatccgtgacagtaggt

SEQ ID NO: 27316 - DNA, 20 bp, Artificial Sequence
  Description of Artificial Sequence: Synthetic oligonucleotide
  Target: COL7A1; (-) strand; PAM type: YTN; PAM sequence: CTG
ggggtctgcgggatccgtga

SEQ ID NO: 27317 - DNA, 20 bp, Artificial Sequence
  Description of Artificial Sequence: Synthetic oligonucleotide
  Target: COL7A1; (-) strand; PAM type: YTN; PAM sequence: CTG
tcactgggggtctgcgggat

SEQ ID NO: 27318 - DNA, 20 bp, Artificial Sequence
  Description of Artificial Sequence: Synthetic oligonucleotide
  Target: COL7A1; (-) strand; PAM type: YTN; PAM sequence: CTC
cgcaaggtaggcgaggacag

SEQ ID NO: 27319 - DNA, 20 bp, Artificial Sequence
  Description of Artificial Sequence: Synthetic oligonucleotide
  Target: COL7A1; (-) strand; PAM type: YTN; PAM sequence: CTG
tggcagactccgcaaggtag

SEQ ID NO: 27320 - DNA, 20 bp, Artificial Sequence
  Description of Artificial Sequence: Synthetic oligonucleotide
  Target: COL7A1; (-) strand; PAM type: YTN; PAM sequence: TTG
ggggcagggctgtggcagac

SEQ ID NO: 27321 - DNA, 20 bp, Artificial Sequence
  Description of Artificial Sequence: Synthetic oligonucleotide
  Target: COL7A1; (-) strand; PAM type: YTN; PAM sequence: TTA
gggaccattgggggcagggc

SEQ ID NO: 27322 - DNA, 20 bp, Artificial Sequence
  Description of Artificial Sequence: Synthetic oligonucleotide
  Target: COL7A1; (-) strand; PAM type: YTN; PAM sequence: CTG
agggtgagaggtgtccccag

SEQ ID NO: 27323 - DNA, 20 bp, Artificial Sequence
  Description of Artificial Sequence: Synthetic oligonucleotide
  Target: COL7A1; (-) strand; PAM type: YTN; PAM sequence: CTG
gcaacctgagggtgagaggt

SEQ ID NO: 27324 - DNA, 20 bp, Artificial Sequence
  Description of Artificial Sequence: Synthetic oligonucleotide
  Target: COL7A1; (-) strand; PAM type: YTN; PAM sequence: CTG
cactggcaacctgagggtga

SEQ ID NO: 27325 - DNA, 20 bp, Artificial Sequence
  Description of Artificial Sequence: Synthetic oligonucleotide
  Target: COL7A1; (-) strand; PAM type: YTN; PAM sequence: TTC
tgcactggcaacctgagggt

SEQ ID NO: 27326 - DNA, 20 bp, Artificial Sequence
  Description of Artificial Sequence: Synthetic oligonucleotide
  Target: COL7A1; (-) strand; PAM type: YTN; PAM sequence: CTT
ctgcactggcaacctgaggg

SEQ ID NO: 27327 - DNA, 20 bp, Artificial Sequence
  Description of Artificial Sequence: Synthetic oligonucleotide
  Target: COL7A1; (-) strand; PAM type: YTN; PAM sequence: TTC
cttctgcactggcaacctga

SEQ ID NO: 27328 - DNA, 20 bp, Artificial Sequence
  Description of Artificial Sequence: Synthetic oligonucleotide
  Target: COL7A1; (-) strand; PAM type: YTN; PAM sequence: CTT
ccttctgcactggcaacctg

SEQ ID NO: 27329 - DNA, 20 bp, Artificial Sequence
  Description of Artificial Sequence: Synthetic oligonucleotide
  Target: COL7A1; (-) strand; PAM type: YTN; PAM sequence: CTG
ggagccggtgcccagagcgc

SEQ ID NO: 27330 - DNA, 20 bp, Artificial Sequence
  Description of Artificial Sequence: Synthetic oligonucleotide
  Target: COL7A1; (-) strand; PAM type: YTN; PAM sequence: CTG
cgctgggagccggtgcccag

SEQ ID NO: 27331 - DNA, 20 bp, Artificial Sequence
  Description of Artificial Sequence: Synthetic oligonucleotide
  Target: COL7A1; (-) strand; PAM type: YTN; PAM sequence: CTG
aggctgcgctgggagccggt

SEQ ID NO: 27332 - DNA, 20 bp, Artificial Sequence
  Description of Artificial Sequence: Synthetic oligonucleotide
  Target: COL7A1; (-) strand; PAM type: YTN; PAM sequence: CTC
gctgaggctgcgctgggagc

SEQ ID NO: 27333 - DNA, 20 bp, Artificial Sequence
  Description of Artificial Sequence: Synthetic oligonucleotide
  Target: COL7A1; (-) strand; PAM type: YTN; PAM sequence: TTC
acgtggtgcagcgcggggag

SEQ ID NO: 27334 - DNA, 20 bp, Artificial Sequence
  Description of Artificial Sequence: Synthetic oligonucleotide
  Target: COL7A1; (-) strand; PAM type: YTN; PAM sequence: CTT
cacgtggtgcagcgcgggga

SEQ ID NO: 27335 - DNA, 20 bp, Artificial Sequence
  Description of Artificial Sequence: Synthetic oligonucleotide
  Target: COL7A1; (-) strand; PAM type: YTN; PAM sequence: CTG
gggacgcttcacgtggtgca

SEQ ID NO: 27336 - DNA, 20 bp, Artificial Sequence
  Description of Artificial Sequence: Synthetic oligonucleotide
  Target: COL7A1; (-) strand; PAM type: YTN; PAM sequence: CTC
cgccagccctggggacgctt

SEQ ID NO: 27337 - DNA, 20 bp, Artificial Sequence
  Description of Artificial Sequence: Synthetic oligonucleotide
  Target: COL7A1; (-) strand; PAM type: YTN; PAM sequence: CTG
aggctccgccagccctgggg

SEQ ID NO: 27338 - DNA, 20 bp, Artificial Sequence
  Description of Artificial Sequence: Synthetic oligonucleotide
  Target: COL7A1; (-) strand; PAM type: YTN; PAM sequence: CTC
cagcgcctgaggctccgcca

SEQ ID NO: 27339 - DNA, 20 bp, Artificial Sequence
  Description of Artificial Sequence: Synthetic oligonucleotide
  Target: COL7A1; (-) strand; PAM type: YTN; PAM sequence: CTC
tccagcgcctgaggctccgc

SEQ ID NO: 27340 - DNA, 20 bp, Artificial Sequence
  Description of Artificial Sequence: Synthetic oligonucleotide
  Target: COL7A1; (-) strand; PAM type: YTN; PAM sequence: TTC
tctccagcgcctgaggctcc

SEQ ID NO: 27341 - DNA, 20 bp, Artificial Sequence
  Description of Artificial Sequence: Synthetic oligonucleotide
  Target: COL7A1; (-) strand; PAM type: YTN; PAM sequence: TTT
ctctccagcgcctgaggctc

SEQ ID NO: 27342 - DNA, 20 bp, Artificial Sequence
  Description of Artificial Sequence: Synthetic oligonucleotide
  Target: COL7A1; (-) strand; PAM type: YTN; PAM sequence: CTT
tctctccagcgcctgaggct

SEQ ID NO: 27343 - DNA, 20 bp, Artificial Sequence
  Description of Artificial Sequence: Synthetic oligonucleotide
  Target: COL7A1; (-) strand; PAM type: YTN; PAM sequence: CTG
agctttctctccagcgcctg

SEQ ID NO: 27344 - DNA, 20 bp, Artificial Sequence
  Description of Artificial Sequence: Synthetic oligonucleotide
  Target: COL7A1; (-) strand; PAM type: YTN; PAM sequence: TTC
ctgagctttctctccagcgc

SEQ ID NO: 27345 - DNA, 20 bp, Artificial Sequence
  Description of Artificial Sequence: Synthetic oligonucleotide
  Target: COL7A1; (-) strand; PAM type: YTN; PAM sequence: CTG
attcctgagctttctctcca

SEQ ID NO: 27346 - DNA, 20 bp, Artificial Sequence
  Description of Artificial Sequence: Synthetic oligonucleotide
  Target: COL7A1; (-) strand; PAM type: YTN; PAM sequence: CTC
cctgattcctgagctttctc

SEQ ID NO: 27347 - DNA, 20 bp, Artificial Sequence
  Description of Artificial Sequence: Synthetic oligonucleotide
  Target: COL7A1; (-) strand; PAM type: YTN; PAM sequence: TTG
gtgcaggggccatgggggca

SEQ ID NO: 27348 - DNA, 20 bp, Artificial Sequence
  Description of Artificial Sequence: Synthetic oligonucleotide
  Target: COL7A1; (-) strand; PAM type: YTN; PAM sequence: CTG
ggattggtgcaggggccatg

SEQ ID NO: 27349 - DNA, 20 bp, Artificial Sequence
  Description of Artificial Sequence: Synthetic oligonucleotide
  Target: COL7A1; (-) strand; PAM type: YTN; PAM sequence: CTG
ggcggggtgcgtgtgccagg

SEQ ID NO: 27350 - DNA, 20 bp, Artificial Sequence
  Description of Artificial Sequence: Synthetic oligonucleotide
  Target: COL7A1; (-) strand; PAM type: YTN; PAM sequence: CTG
agaggctgggcggggtgcgt

SEQ ID NO: 27351 - DNA, 20 bp, Artificial Sequence
  Description of Artificial Sequence: Synthetic oligonucleotide
  Target: COL7A1; (-) strand; PAM type: YTN; PAM sequence: CTG
agaggagggagaggggtctg

SEQ ID NO: 27352 - DNA, 20 bp, Artificial Sequence
  Description of Artificial Sequence: Synthetic oligonucleotide
  Target: COL7A1; (-) strand; PAM type: YTN; PAM sequence: TTG
ggggcagggtctgagaggag

SEQ ID NO: 27353 - DNA, 20 bp, Artificial Sequence
  Description of Artificial Sequence: Synthetic oligonucleotide
  Target: COL7A1; (-) strand; PAM type: YTN; PAM sequence: TTT
gggggcagggtctgagagga

SEQ ID NO: 27354 - DNA, 20 bp, Artificial Sequence
  Description of Artificial Sequence: Synthetic oligonucleotide
  Target: COL7A1; (-) strand; PAM type: YTN; PAM sequence: CTT
tgggggcagggtctgagagg

SEQ ID NO: 27355 - DNA, 20 bp, Artificial Sequence
  Description of Artificial Sequence: Synthetic oligonucleotide
  Target: COL7A1; (-) strand; PAM type: YTN; PAM sequence: TTG
gtagtgagcctttgggggca

SEQ ID NO: 27356 - DNA, 20 bp, Artificial Sequence
  Description of Artificial Sequence: Synthetic oligonucleotide
  Target: COL7A1; (-) strand; PAM type: YTN; PAM sequence: TTG
gagaaaggaccaggattggt

SEQ ID NO: 27357 - DNA, 20 bp, Artificial Sequence
  Description of Artificial Sequence: Synthetic oligonucleotide
  Target: COL7A1; (-) strand; PAM type: YTN; PAM sequence: CTG
gattggagaaaggaccagga

SEQ ID NO: 27358 - DNA, 20 bp, Artificial Sequence
  Description of Artificial Sequence: Synthetic oligonucleotide
  Target: COL7A1; (-) strand; PAM type: YTN; PAM sequence: CTC
tggattggagaaaggaccag

SEQ ID NO: 27359 - DNA, 20 bp, Artificial Sequence
  Description of Artificial Sequence: Synthetic oligonucleotide
  Target: COL7A1; (-) strand; PAM type: YTN; PAM sequence: TTG
tgctctggattggagaaagg

SEQ ID NO: 27360 - DNA, 20 bp, Artificial Sequence
  Description of Artificial Sequence: Synthetic oligonucleotide
  Target: COL7A1; (-) strand; PAM type: YTN; PAM sequence: CTT
gtgctctggattggagaaag

SEQ ID NO: 27361 - DNA, 20 bp, Artificial Sequence
  Description of Artificial Sequence: Synthetic oligonucleotide
  Target: COL7A1; (-) strand; PAM type: YTN; PAM sequence: TTG
gggatccgggcttgtgctct

SEQ ID NO: 27362 - DNA, 20 bp, Artificial Sequence
  Description of Artificial Sequence: Synthetic oligonucleotide
  Target: COL7A1; (-) strand; PAM type: YTN; PAM sequence: TTT
ggggatccgggcttgtgctc

SEQ ID NO: 27363 - DNA, 20 bp, Artificial Sequence
  Description of Artificial Sequence: Synthetic oligonucleotide
  Target: COL7A1; (-) strand; PAM type: YTN; PAM sequence: TTC
ggatgggtggtgtggatggt

SEQ ID NO: 27364 - DNA, 20 bp, Artificial Sequence
  Description of Artificial Sequence: Synthetic oligonucleotide
  Target: COL7A1; (-) strand; PAM type: YTN; PAM sequence: CTT
cggatgggtggtgtggatgg

SEQ ID NO: 27365 - DNA, 20 bp, Artificial Sequence
  Description of Artificial Sequence: Synthetic oligonucleotide
  Target: COL7A1; (-) strand; PAM type: YTN; PAM sequence: CTG
gagagcttcggatgggtggt

SEQ ID NO: 27366 - DNA, 20 bp, Artificial Sequence
  Description of Artificial Sequence: Synthetic oligonucleotide
  Target: COL7A1; (-) strand; PAM type: YTN; PAM sequence: CTA
cgcgtaggcagagcatgcgc

SEQ ID NO: 27367 - DNA, 20 bp, Artificial Sequence
  Description of Artificial Sequence: Synthetic oligonucleotide
  Target: COL7A1; (-) strand; PAM type: YTN; PAM sequence: TTG
tcactacgcgtaggcagagc

SEQ ID NO: 27368 - DNA, 20 bp, Artificial Sequence
  Description of Artificial Sequence: Synthetic oligonucleotide
  Target: COL7A1; (-) strand; PAM type: YTN; PAM sequence: TTG
ttgtcactacgcgtaggcag

SEQ ID NO: 27369 - DNA, 20 bp, Artificial Sequence
  Description of Artificial Sequence: Synthetic oligonucleotide
  Target: COL7A1; (-) strand; PAM type: YTN; PAM sequence: CTC
cattgttgtcactacgcgta

SEQ ID NO: 27370 - DNA, 20 bp, Artificial Sequence
  Description of Artificial Sequence: Synthetic oligonucleotide
  Target: COL7A1; (-) strand; PAM type: YTN; PAM sequence: CTG
tctccattgttgtcactacg

SEQ ID NO: 27371 - DNA, 20 bp, Artificial Sequence
  Description of Artificial Sequence: Synthetic oligonucleotide
  Target: COL7A1; (-) strand; PAM type: YTN; PAM sequence: TTG
tcggggaccgcgagggcaca

SEQ ID NO: 27372 - DNA, 20 bp, Artificial Sequence
  Description of Artificial Sequence: Synthetic oligonucleotide
  Target: COL7A1; (-) strand; PAM type: YTN; PAM sequence: CTT
gtcggggaccgcgagggcac

SEQ ID NO: 27373 - DNA, 20 bp, Artificial Sequence
  Description of Artificial Sequence: Synthetic oligonucleotide
  Target: COL7A1; (-) strand; PAM type: YTN; PAM sequence: CTG
cacttgtcggggaccgcgag

SEQ ID NO: 27374 - DNA, 20 bp, Artificial Sequence
  Description of Artificial Sequence: Synthetic oligonucleotide
  Target: COL7A1; (-) strand; PAM type: YTN; PAM sequence: CTC
agtgcgagtgactgcacttg

SEQ ID NO: 27375 - DNA, 20 bp, Artificial Sequence
  Description of Artificial Sequence: Synthetic oligonucleotide
  Target: COL7A1; (-) strand; PAM type: YTN; PAM sequence: CTA
ctcagtgcgagtgactgcac

SEQ ID NO: 27376 - DNA, 20 bp, Artificial Sequence
  Description of Artificial Sequence: Synthetic oligonucleotide
  Target: COL7A1; (-) strand; PAM type: YTN; PAM sequence: CTC
gaaggtggagtcagctactc

SEQ ID NO: 27377 - DNA, 20 bp, Artificial Sequence
  Description of Artificial Sequence: Synthetic oligonucleotide
  Target: COL7A1; (-) strand; PAM type: YTN; PAM sequence: CTG
cagagatccggggtctcgaa

SEQ ID NO: 27378 - DNA, 20 bp, Artificial Sequence
  Description of Artificial Sequence: Synthetic oligonucleotide
  Target: COL7A1; (-) strand; PAM type: YTN; PAM sequence: CTC
tgcagagatccggggtctcg

SEQ ID NO: 27379 - DNA, 20 bp, Artificial Sequence
  Description of Artificial Sequence: Synthetic oligonucleotide
  Target: COL7A1; (-) strand; PAM type: YTN; PAM sequence: CTC
ccaggaaacacagactctgc

SEQ ID NO: 27380 - DNA, 20 bp, Artificial Sequence
  Description of Artificial Sequence: Synthetic oligonucleotide
  Target: COL7A1; (-) strand; PAM type: YTN; PAM sequence: CTG
gccaggcggccccatgaggc

SEQ ID NO: 27381 - DNA, 20 bp, Artificial Sequence
  Description of Artificial Sequence: Synthetic oligonucleotide
  Target: COL7A1; (-) strand; PAM type: YTN; PAM sequence: CTG
tatgcccacctggccaggcg

SEQ ID NO: 27382 - DNA, 20 bp, Artificial Sequence
  Description of Artificial Sequence: Synthetic oligonucleotide
  Target: COL7A1; (-) strand; PAM type: YTN; PAM sequence: TTG
ctgtatgcccacctggccag

SEQ ID NO: 27383 - DNA, 20 bp, Artificial Sequence
  Description of Artificial Sequence: Synthetic oligonucleotide
  Target: COL7A1; (-) strand; PAM type: YTN; PAM sequence: CTA
accattgctgtatgcccacc

SEQ ID NO: 27384 - DNA, 20 bp, Artificial Sequence
  Description of Artificial Sequence: Synthetic oligonucleotide
  Target: COL7A1; (-) strand; PAM type: YTN; PAM sequence: CTC
acccctaaccattgctgtat

SEQ ID NO: 27385 - DNA, 20 bp, Artificial Sequence
  Description of Artificial Sequence: Synthetic oligonucleotide
  Target: COL7A1; (-) strand; PAM type: YTN; PAM sequence: CTG
ctcacccctaaccattgctg

SEQ ID NO: 27386 - DNA, 20 bp, Artificial Sequence
  Description of Artificial Sequence: Synthetic oligonucleotide
  Target: COL7A1; (-) strand; PAM type: YTN; PAM sequence: CTG
ggactgctcacccctaacca

SEQ ID NO: 27387 - DNA, 20 bp, Artificial Sequence
  Description of Artificial Sequence: Synthetic oligonucleotide
  Target: COL7A1; (-) strand; PAM type: YTN; PAM sequence: CTG
gctgggactgctcaccccta

SEQ ID NO: 27388 - DNA, 20 bp, Artificial Sequence
  Description of Artificial Sequence: Synthetic oligonucleotide
  Target: COL7A1; (-) strand; PAM type: YTN; PAM sequence: TTC
ctggctgggactgctcaccc

SEQ ID NO: 27389 - DNA, 20 bp, Artificial Sequence
  Description of Artificial Sequence: Synthetic oligonucleotide
  Target: COL7A1; (-) strand; PAM type: YTN; PAM sequence: CTT
cctggctgggactgctcacc

SEQ ID NO: 27390 - DNA, 20 bp, Artificial Sequence
  Description of Artificial Sequence: Synthetic oligonucleotide
  Target: COL7A1; (-) strand; PAM type: YTN; PAM sequence: CTG
tccttcctggctgggactgc

SEQ ID NO: 27391 - DNA, 20 bp, Artificial Sequence
  Description of Artificial Sequence: Synthetic oligonucleotide
  Target: COL7A1; (-) strand; PAM type: YTN; PAM sequence: CTG
acgccacccctgtccttcct

SEQ ID NO: 27392 - DNA, 20 bp, Artificial Sequence
  Description of Artificial Sequence: Synthetic oligonucleotide
  Target: COL7A1; (-) strand; PAM type: YTN; PAM sequence: CTC
cctgacgccacccctgtcct

SEQ ID NO: 27393 - DNA, 20 bp, Artificial Sequence
  Description of Artificial Sequence: Synthetic oligonucleotide
  Target: COL7A1; (-) strand; PAM type: YTN; PAM sequence: CTG
gggccggagtgaaggtatgg

SEQ ID NO: 27394 - DNA, 20 bp, Artificial Sequence
  Description of Artificial Sequence: Synthetic oligonucleotide
  Target: COL7A1; (-) strand; PAM type: YTN; PAM sequence: CTG
gcctggggccggagtgaagg

SEQ ID NO: 27395 - DNA, 20 bp, Artificial Sequence
  Description of Artificial Sequence: Synthetic oligonucleotide
  Target: COL7A1; (-) strand; PAM type: YTN; PAM sequence: TTA
cagactggcctggggccgga

SEQ ID NO: 27396 - DNA, 20 bp, Artificial Sequence
  Description of Artificial Sequence: Synthetic oligonucleotide
  Target: COL7A1; (-) strand; PAM type: YTN; PAM sequence: CTT
acagactggcctggggccgg

SEQ ID NO: 27397 - DNA, 20 bp, Artificial Sequence
  Description of Artificial Sequence: Synthetic oligonucleotide
  Target: COL7A1; (-) strand; PAM type: YTN; PAM sequence: CTG
gagccacagcttacagactg

SEQ ID NO: 27398 - DNA, 20 bp, Artificial Sequence
  Description of Artificial Sequence: Synthetic oligonucleotide
  Target: COL7A1; (-) strand; PAM type: YTN; PAM sequence: CTG
ggtaggggtcactggagcca

SEQ ID NO: 27399 - DNA, 20 bp, Artificial Sequence
  Description of Artificial Sequence: Synthetic oligonucleotide
  Target: COL7A1; (-) strand; PAM type: YTN; PAM sequence: CTA
cggatcacctgggtaggggt

SEQ ID NO: 27400 - DNA, 20 bp, Artificial Sequence
  Description of Artificial Sequence: Synthetic oligonucleotide
  Target: COL7A1; (-) strand; PAM type: YTN; PAM sequence: TTC
tacggatcacctgggtaggg

SEQ ID NO: 27401 - DNA, 20 bp, Artificial Sequence
  Description of Artificial Sequence: Synthetic oligonucleotide
  Target: COL7A1; (-) strand; PAM type: YTN; PAM sequence: TTC
cagcgacgttctacggatca

SEQ ID NO: 27402 - DNA, 20 bp, Artificial Sequence
  Description of Artificial Sequence: Synthetic oligonucleotide
  Target: COL7A1; (-) strand; PAM type: YTN; PAM sequence: CTT
ccagcgacgttctacggatc

SEQ ID NO: 27403 - DNA, 20 bp, Artificial Sequence
  Description of Artificial Sequence: Synthetic oligonucleotide
  Target: COL7A1; (-) strand; PAM type: YTN; PAM sequence: CTC
aatgcttccagcgacgttct

SEQ ID NO: 27404 - DNA, 20 bp, Artificial Sequence
  Description of Artificial Sequence: Synthetic oligonucleotide
  Target: COL7A1; (-) strand; PAM type: YTN; PAM sequence: CTG
cagatcctcaatgcttccag

SEQ ID NO: 27405 - DNA, 20 bp, Artificial Sequence
  Description of Artificial Sequence: Synthetic oligonucleotide
  Target: COL7A1; (-) strand; PAM type: YTN; PAM sequence: CTG
tgggtcgtgtgtcgaggctg

SEQ ID NO: 27406 - DNA, 20 bp, Artificial Sequence
  Description of Artificial Sequence: Synthetic oligonucleotide
  Target: COL7A1; (-) strand; PAM type: YTN; PAM sequence: CTG
agcctgtgggtcgtgtgtcg

SEQ ID NO: 27407 - DNA, 20 bp, Artificial Sequence
  Description of Artificial Sequence: Synthetic oligonucleotide
  Target: COL7A1; (-) strand; PAM type: YTN; PAM sequence: CTG
tccccagcccctgagcctgt

SEQ ID NO: 27408 - DNA, 20 bp, Artificial Sequence
  Description of Artificial Sequence: Synthetic oligonucleotide
  Target: COL7A1; (-) strand; PAM type: YTN; PAM sequence: CTC
tgtccccagcccctgagcct

SEQ ID NO: 27409 - DNA, 20 bp, Artificial Sequence
  Description of Artificial Sequence: Synthetic oligonucleotide
  Target: COL7A1; (-) strand; PAM type: YTN; PAM sequence: TTG
cctctgtccccagcccctga

SEQ ID NO: 27410 - DNA, 20 bp, Artificial Sequence
  Description of Artificial Sequence: Synthetic oligonucleotide
  Target: COL7A1; (-) strand; PAM type: YTN; PAM sequence: CTT
gcctctgtccccagcccctg

SEQ ID NO: 27411 - DNA, 20 bp, Artificial Sequence
  Description of Artificial Sequence: Synthetic oligonucleotide
  Target: COL7A1; (-) strand; PAM type: YTN; PAM sequence: TTA
ccttgcctctgtccccagcc

SEQ ID NO: 27412 - DNA, 20 bp, Artificial Sequence
  Description of Artificial Sequence: Synthetic oligonucleotide
  Target: COL7A1; (-) strand; PAM type: YTN; PAM sequence: CTT
accttgcctctgtccccagc

SEQ ID NO: 27413 - DNA, 20 bp, Artificial Sequence
  Description of Artificial Sequence: Synthetic oligonucleotide
  Target: COL7A1; (-) strand; PAM type: YTN; PAM sequence: CTA
ccaggaccccttaccttgcc

SEQ ID NO: 27414 - DNA, 20 bp, Artificial Sequence
  Description of Artificial Sequence: Synthetic oligonucleotide
  Target: COL7A1; (-) strand; PAM type: YTN; PAM sequence: CTC
taccaggaccccttaccttg

SEQ ID NO: 27415 - DNA, 20 bp, Artificial Sequence
  Description of Artificial Sequence: Synthetic oligonucleotide
  Target: COL7A1; (-) strand; PAM type: YTN; PAM sequence: TTC
tctaccaggaccccttacct

SEQ ID NO: 27416 - DNA, 20 bp, Artificial Sequence
  Description of Artificial Sequence: Synthetic oligonucleotide
  Target: COL7A1; (-) strand; PAM type: YTN; PAM sequence: CTG
ttctctaccaggacccctta

SEQ ID NO: 27417 - DNA, 20 bp, Artificial Sequence
  Description of Artificial Sequence: Synthetic oligonucleotide
  Target: COL7A1; (-) strand; PAM type: YTN; PAM sequence: CTC
tgttctctaccaggacccct

SEQ ID NO: 27418 - DNA, 20 bp, Artificial Sequence
  Description of Artificial Sequence: Synthetic oligonucleotide
  Target: COL7A1; (-) strand; PAM type: YTN; PAM sequence: CTC
tctgttctctaccaggaccc

SEQ ID NO: 27419 - DNA, 20 bp, Artificial Sequence
  Description of Artificial Sequence: Synthetic oligonucleotide
  Target: COL7A1; (-) strand; PAM type: YTN; PAM sequence: CTG
cctctctgttctctaccagg

SEQ ID NO: 27420 - DNA, 20 bp, Artificial Sequence
  Description of Artificial Sequence: Synthetic oligonucleotide
  Target: COL7A1; (-) strand; PAM type: YTN; PAM sequence: CTG
cactgcctctctgttctcta

SEQ ID NO: 27421 - DNA, 20 bp, Artificial Sequence
  Description of Artificial Sequence: Synthetic oligonucleotide
  Target: COL7A1; (-) strand; PAM type: YTN; PAM sequence: TTC
ctgcactgcctctctgttct

SEQ ID NO: 27422 - DNA, 20 bp, Artificial Sequence
  Description of Artificial Sequence: Synthetic oligonucleotide
  Target: COL7A1; (-) strand; PAM type: YTN; PAM sequence: CTG
cgtcaaccattcctgcactg

SEQ ID NO: 27423 - DNA, 20 bp, Artificial Sequence
  Description of Artificial Sequence: Synthetic oligonucleotide
  Target: COL7A1; (-) strand; PAM type: YTN; PAM sequence: TTC
agatcacccctgcgtcaacc

SEQ ID NO: 27424 - DNA, 20 bp, Artificial Sequence
  Description of Artificial Sequence: Synthetic oligonucleotide
  Target: COL7A1; (-) strand; PAM type: YTN; PAM sequence: TTT
cagatcacccctgcgtcaac

SEQ ID NO: 27425 - DNA, 20 bp, Artificial Sequence
  Description of Artificial Sequence: Synthetic oligonucleotide
  Target: COL7A1; (-) strand; PAM type: YTN; PAM sequence: CTT
tcagatcacccctgcgtcaa

SEQ ID NO: 27426 - DNA, 20 bp, Artificial Sequence
  Description of Artificial Sequence: Synthetic oligonucleotide
  Target: COL7A1; (-) strand; PAM type: YTN; PAM sequence: CTG
actttcagatcacccctgcg

SEQ ID NO: 27427 - DNA, 20 bp, Artificial Sequence
  Description of Artificial Sequence: Synthetic oligonucleotide
  Target: COL7A1; (-) strand; PAM type: YTN; PAM sequence: CTC
acactgactttcagatcacc

SEQ ID NO: 27428 - DNA, 20 bp, Artificial Sequence
  Description of Artificial Sequence: Synthetic oligonucleotide
  Target: COL7A1; (-) strand; PAM type: YTN; PAM sequence: CTA
acctcacactgactttcaga

SEQ ID NO: 27429 - DNA, 20 bp, Artificial Sequence
  Description of Artificial Sequence: Synthetic oligonucleotide
  Target: COL7A1; (-) strand; PAM type: YTN; PAM sequence: CTG
tccacactaacctcacactg

SEQ ID NO: 27430 - DNA, 20 bp, Artificial Sequence
  Description of Artificial Sequence: Synthetic oligonucleotide
  Target: COL7A1; (-) strand; PAM type: YTN; PAM sequence: CTA
aagtgacctgtccacactaa

SEQ ID NO: 27431 - DNA, 20 bp, Artificial Sequence
  Description of Artificial Sequence: Synthetic oligonucleotide
  Target: COL7A1; (-) strand; PAM type: YTN; PAM sequence: CTG
cctaaagtgacctgtccaca

SEQ ID NO: 27432 - DNA, 20 bp, Artificial Sequence
  Description of Artificial Sequence: Synthetic oligonucleotide
  Target: COL7A1; (-) strand; PAM type: YTN; PAM sequence: CTC
agggctgcctaaagtgacct

SEQ ID NO: 27433 - DNA, 20 bp, Artificial Sequence
  Description of Artificial Sequence: Synthetic oligonucleotide
  Target: COL7A1; (-) strand; PAM type: YTN; PAM sequence: CTC
ctcagggctgcctaaagtga

SEQ ID NO: 27434 - DNA, 20 bp, Artificial Sequence
  Description of Artificial Sequence: Synthetic oligonucleotide
  Target: COL7A1; (-) strand; PAM type: YTN; PAM sequence: CTC
ctcctcagggctgcctaaag

SEQ ID NO: 27435 - DNA, 20 bp, Artificial Sequence
  Description of Artificial Sequence: Synthetic oligonucleotide
  Target: COL7A1; (-) strand; PAM type: YTN; PAM sequence: CTC
ctcctcctcagggctgccta

SEQ ID NO: 27436 - DNA, 20 bp, Artificial Sequence
  Description of Artificial Sequence: Synthetic oligonucleotide
  Target: COL7A1; (-) strand; PAM type: YTN; PAM sequence: CTG
acctcctcctcctcagggct

SEQ ID NO: 27437 - DNA, 20 bp, Artificial Sequence
  Description of Artificial Sequence: Synthetic oligonucleotide
  Target: COL7A1; (-) strand; PAM type: YTN; PAM sequence: CTG
cccaccccaaggcactgacc

SEQ ID NO: 27438 - DNA, 20 bp, Artificial Sequence
  Description of Artificial Sequence: Synthetic oligonucleotide
  Target: COL7A1; (-) strand; PAM type: YTN; PAM sequence: CTG
gtggccccacactgcccacc

SEQ ID NO: 27439 - DNA, 20 bp, Artificial Sequence
  Description of Artificial Sequence: Synthetic oligonucleotide
  Target: COL7A1; (-) strand; PAM type: YTN; PAM sequence: CTC
ctggtggccccacactgccc

SEQ ID NO: 27440 - DNA, 20 bp, Artificial Sequence
  Description of Artificial Sequence: Synthetic oligonucleotide
  Target: COL7A1; (-) strand; PAM type: YTN; PAM sequence: TTA
agtgtccacccacggtgacc

SEQ ID NO: 27441 - DNA, 20 bp, Artificial Sequence
  Description of Artificial Sequence: Synthetic oligonucleotide
  Target: COL7A1; (-) strand; PAM type: YTN; PAM sequence: CTG
attaagtgtccacccacggt

SEQ ID NO: 27442 - DNA, 20 bp, Artificial Sequence
  Description of Artificial Sequence: Synthetic oligonucleotide
  Target: COL7A1; (-) strand; PAM type: YTN; PAM sequence: CTG
acccaccccacactgattaa

SEQ ID NO: 27443 - DNA, 20 bp, Artificial Sequence
  Description of Artificial Sequence: Synthetic oligonucleotide
  Target: COL7A1; (-) strand; PAM type: YTN; PAM sequence: CTG
tccacactgacccaccccac

SEQ ID NO: 27444 - DNA, 20 bp, Artificial Sequence
  Description of Artificial Sequence: Synthetic oligonucleotide
  Target: COL7A1; (-) strand; PAM type: YTN; PAM sequence: CTG
tcctgtccacactgacccac

SEQ ID NO: 27445 - DNA, 20 bp, Artificial Sequence
  Description of Artificial Sequence: Synthetic oligonucleotide
  Target: COL7A1; (-) strand; PAM type: YTN; PAM sequence: CTC
agtgactgtcctgtccacac

SEQ ID NO: 27446 - DNA, 20 bp, Artificial Sequence
  Description of Artificial Sequence: Synthetic oligonucleotide
  Target: COL7A1; (-) strand; PAM type: YTN; PAM sequence: CTG
ctcagtgactgtcctgtcca

SEQ ID NO: 27447 - DNA, 20 bp, Artificial Sequence
  Description of Artificial Sequence: Synthetic oligonucleotide
  Target: COL7A1; (-) strand; PAM type: YTN; PAM sequence: CTC
cacccccctgctcagtgact

SEQ ID NO: 27448 - DNA, 20 bp, Artificial Sequence
  Description of Artificial Sequence: Synthetic oligonucleotide
  Target: COL7A1; (-) strand; PAM type: YTN; PAM sequence: CTG
cctccacccccctgctcagt

SEQ ID NO: 27449 - DNA, 20 bp, Artificial Sequence
  Description of Artificial Sequence: Synthetic oligonucleotide
  Target: COL7A1; (-) strand; PAM type: YTN; PAM sequence: TTG
cccagctgcctccacccccc

SEQ ID NO: 27450 - DNA, 20 bp, Artificial Sequence
  Description of Artificial Sequence: Synthetic oligonucleotide
  Target: COL7A1; (-) strand; PAM type: YTN; PAM sequence: CTG
attgcccagctgcctccacc

SEQ ID NO: 27451 - DNA, 20 bp, Artificial Sequence
  Description of Artificial Sequence: Synthetic oligonucleotide
  Target: COL7A1; (-) strand; PAM type: YTN; PAM sequence: TTC
ctgattgcccagctgcctcc

SEQ ID NO: 27452 - DNA, 20 bp, Artificial Sequence
  Description of Artificial Sequence: Synthetic oligonucleotide
  Target: COL7A1; (-) strand; PAM type: YTN; PAM sequence: CTG
tgtgttcctgattgcccagc

SEQ ID NO: 27453 - DNA, 20 bp, Artificial Sequence
  Description of Artificial Sequence: Synthetic oligonucleotide
  Target: COL7A1; (-) strand; PAM type: YTN; PAM sequence: CTG
ctgtgtgttcctgattgccc

SEQ ID NO: 27454 - DNA, 20 bp, Artificial Sequence
  Description of Artificial Sequence: Synthetic oligonucleotide
  Target: COL7A1; (-) strand; PAM type: YTN; PAM sequence: CTG
ccctgctgtgtgttcctgat

SEQ ID NO: 27455 - DNA, 20 bp, Artificial Sequence
  Description of Artificial Sequence: Synthetic oligonucleotide
  Target: COL7A1; (-) strand; PAM type: YTN; PAM sequence: CTA
ccctgccctgctgtgtgttc

SEQ ID NO: 27456 - DNA, 20 bp, Artificial Sequence
  Description of Artificial Sequence: Synthetic oligonucleotide
  Target: COL7A1; (-) strand; PAM type: YTN; PAM sequence: TTA
gctaccctgccctgctgtgt

SEQ ID NO: 27457 - DNA, 20 bp, Artificial Sequence
  Description of Artificial Sequence: Synthetic oligonucleotide
  Target: COL7A1; (-) strand; PAM type: YTN; PAM sequence: CTA
gccacaccgcattagctacc

SEQ ID NO: 27458 - DNA, 20 bp, Artificial Sequence
  Description of Artificial Sequence: Synthetic oligonucleotide
  Target: COL7A1; (-) strand; PAM type: YTN; PAM sequence: CTA
ctagccacaccgcattagct

SEQ ID NO: 27459 - DNA, 20 bp, Artificial Sequence
  Description of Artificial Sequence: Synthetic oligonucleotide
  Target: COL7A1; (-) strand; PAM type: YTN; PAM sequence: CTG
gccagctactagccacaccg

SEQ ID NO: 27460 - DNA, 20 bp, Artificial Sequence
  Description of Artificial Sequence: Synthetic oligonucleotide
  Target: COL7A1; (-) strand; PAM type: YTN; PAM sequence: CTG
gtgagtggaccctggccagc

SEQ ID NO: 27461 - DNA, 20 bp, Artificial Sequence
  Description of Artificial Sequence: Synthetic oligonucleotide
  Target: COL7A1; (-) strand; PAM type: YTN; PAM sequence: TTG
tgaggactggtgagtggacc

SEQ ID NO: 27462 - DNA, 20 bp, Artificial Sequence
  Description of Artificial Sequence: Synthetic oligonucleotide
  Target: COL7A1; (-) strand; PAM type: YTN; PAM sequence: CTG
tggttgtgaggactggtgag

SEQ ID NO: 27463 - DNA, 20 bp, Artificial Sequence
  Description of Artificial Sequence: Synthetic oligonucleotide
  Target: COL7A1; (-) strand; PAM type: YTN; PAM sequence: CTC
tgtggttgtgaggactggtg

SEQ ID NO: 27464 - DNA, 20 bp, Artificial Sequence
  Description of Artificial Sequence: Synthetic oligonucleotide
  Target: COL7A1; (-) strand; PAM type: YTN; PAM sequence: CTG
cctctgtggttgtgaggact

SEQ ID NO: 27465 - DNA, 20 bp, Artificial Sequence
  Description of Artificial Sequence: Synthetic oligonucleotide
  Target: COL7A1; (-) strand; PAM type: YTN; PAM sequence: CTG
gcgtggatgggccccctgcc

SEQ ID NO: 27466 - DNA, 20 bp, Artificial Sequence
  Description of Artificial Sequence: Synthetic oligonucleotide
  Target: COL7A1; (-) strand; PAM type: YTN; PAM sequence: CTG
agtatacggtgcatgtgagg

SEQ ID NO: 27467 - DNA, 20 bp, Artificial Sequence
  Description of Artificial Sequence: Synthetic oligonucleotide
  Target: COL7A1; (-) strand; PAM type: YTN; PAM sequence: CTG
gagccagatactgagtatac

SEQ ID NO: 27468 - DNA, 20 bp, Artificial Sequence
  Description of Artificial Sequence: Synthetic oligonucleotide
  Target: COL7A1; (-) strand; PAM type: YTN; PAM sequence: CTG
gatggactggagccagatac

SEQ ID NO: 27469 - DNA, 20 bp, Artificial Sequence
  Description of Artificial Sequence: Synthetic oligonucleotide
  Target: COL7A1; (-) strand; PAM type: YTN; PAM sequence: CTG
agctggatggactggagcca

SEQ ID NO: 27470 - DNA, 20 bp, Artificial Sequence
  Description of Artificial Sequence: Synthetic oligonucleotide
  Target: COL7A1; (-) strand; PAM type: YTN; PAM sequence: CTG
gggaggccacggtggctgag

SEQ ID NO: 27471 - DNA, 20 bp, Artificial Sequence
  Description of Artificial Sequence: Synthetic oligonucleotide
  Target: COL7A1; (-) strand; PAM type: YTN; PAM sequence: TTC
tggggaggccacggtggctg

SEQ ID NO: 27472 - DNA, 20 bp, Artificial Sequence
  Description of Artificial Sequence: Synthetic oligonucleotide
  Target: COL7A1; (-) strand; PAM type: YTN; PAM sequence: TTT
ctggggaggccacggtggct

SEQ ID NO: 27473 - DNA, 20 bp, Artificial Sequence
  Description of Artificial Sequence: Synthetic oligonucleotide
  Target: COL7A1; (-) strand; PAM type: YTN; PAM sequence: TTG
gtttctggggaggccacggt

SEQ ID NO: 27474 - DNA, 20 bp, Artificial Sequence
  Description of Artificial Sequence: Synthetic oligonucleotide
  Target: COL7A1; (-) strand; PAM type: YTN; PAM sequence: TTC
ccaggcccagagaaatccca

SEQ ID NO: 27475 - DNA, 20 bp, Artificial Sequence
  Description of Artificial Sequence: Synthetic oligonucleotide
  Target: COL7A1; (-) strand; PAM type: YTN; PAM sequence: CTG
ttcccaggcccagagaaatc

SEQ ID NO: 27476 - DNA, 20 bp, Artificial Sequence
  Description of Artificial Sequence: Synthetic oligonucleotide
  Target: COL7A1; (-) strand; PAM type: YTN; PAM sequence: CTC
catccctgttcccaggccca

SEQ ID NO: 27477 - DNA, 20 bp, Artificial Sequence
  Description of Artificial Sequence: Synthetic oligonucleotide
  Target: COL7A1; (-) strand; PAM type: YTN; PAM sequence: CTG
cctccatccctgttcccagg

SEQ ID NO: 27478 - DNA, 20 bp, Artificial Sequence
  Description of Artificial Sequence: Synthetic oligonucleotide
  Target: COL7A1; (-) strand; PAM type: YTN; PAM sequence: CTG
gagctgcctccatccctgtt

SEQ ID NO: 27479 - DNA, 20 bp, Artificial Sequence
  Description of Artificial Sequence: Synthetic oligonucleotide
  Target: COL7A1; (-) strand; PAM type: YTN; PAM sequence: CTA
gccctggagctgcctccatc

SEQ ID NO: 27480 - DNA, 20 bp, Artificial Sequence
  Description of Artificial Sequence: Synthetic oligonucleotide
  Target: COL7A1; (-) strand; PAM type: YTN; PAM sequence: TTG
ctagccctggagctgcctcc

SEQ ID NO: 27481 - DNA, 20 bp, Artificial Sequence
  Description of Artificial Sequence: Synthetic oligonucleotide
  Target: COL7A1; (-) strand; PAM type: YTN; PAM sequence: TTT
gctagccctggagctgcctc

SEQ ID NO: 27482 - DNA, 20 bp, Artificial Sequence
  Description of Artificial Sequence: Synthetic oligonucleotide
  Target: COL7A1; (-) strand; PAM type: YTN; PAM sequence: CTG
gggcacagagtttgctagcc

SEQ ID NO: 27483 - DNA, 20 bp, Artificial Sequence
  Description of Artificial Sequence: Synthetic oligonucleotide
  Target: COL7A1; (-) strand; PAM type: YTN; PAM sequence: CTC
tggggcacagagtttgctag

SEQ ID NO: 27484 - DNA, 20 bp, Artificial Sequence
  Description of Artificial Sequence: Synthetic oligonucleotide
  Target: COL7A1; (-) strand; PAM type: YTN; PAM sequence: TTG
ggggtccaggtggggctctg

SEQ ID NO: 27485 - DNA, 20 bp, Artificial Sequence
  Description of Artificial Sequence: Synthetic oligonucleotide
  Target: COL7A1; (-) strand; PAM type: YTN; PAM sequence: TTA
ttgggggtccaggtggggct

SEQ ID NO: 27486 - DNA, 20 bp, Artificial Sequence
  Description of Artificial Sequence: Synthetic oligonucleotide
  Target: COL7A1; (-) strand; PAM type: YTN; PAM sequence: TTT
attgggggtccaggtggggc

SEQ ID NO: 27487 - DNA, 20 bp, Artificial Sequence
  Description of Artificial Sequence: Synthetic oligonucleotide
  Target: COL7A1; (-) strand; PAM type: YTN; PAM sequence: CTG
ggggtttattgggggtccag

SEQ ID NO: 27488 - DNA, 20 bp, Artificial Sequence
  Description of Artificial Sequence: Synthetic oligonucleotide
  Target: COL7A1; (-) strand; PAM type: YTN; PAM sequence: TTG
ggagggggcaggtcagggtg

SEQ ID NO: 27489 - DNA, 20 bp, Artificial Sequence
  Description of Artificial Sequence: Synthetic oligonucleotide
  Target: COL7A1; (-) strand; PAM type: YTN; PAM sequence: TTT
gggagggggcaggtcagggt

SEQ ID NO: 27490 - DNA, 20 bp, Artificial Sequence
  Description of Artificial Sequence: Synthetic oligonucleotide
  Target: COL7A1; (-) strand; PAM type: YTN; PAM sequence: CTG
gggtttgggagggggcaggt

SEQ ID NO: 27491 - DNA, 20 bp, Artificial Sequence
  Description of Artificial Sequence: Synthetic oligonucleotide
  Target: COL7A1; (-) strand; PAM type: YTN; PAM sequence: CTC
agcccacggtggggactggg

SEQ ID NO: 27492 - DNA, 20 bp, Artificial Sequence
  Description of Artificial Sequence: Synthetic oligonucleotide
  Target: COL7A1; (-) strand; PAM type: YTN; PAM sequence: CTG
gcactcagcccacggtgggg

SEQ ID NO: 27493 - DNA, 20 bp, Artificial Sequence
  Description of Artificial Sequence: Synthetic oligonucleotide
  Target: COL7A1; (-) strand; PAM type: YTN; PAM sequence: TTC
ctggcactcagcccacggtg

SEQ ID NO: 27494 - DNA, 20 bp, Artificial Sequence
  Description of Artificial Sequence: Synthetic oligonucleotide
  Target: COL7A1; (-) strand; PAM type: YTN; PAM sequence: TTT
cctggcactcagcccacggt

SEQ ID NO: 27495 - DNA, 20 bp, Artificial Sequence
  Description of Artificial Sequence: Synthetic oligonucleotide
  Target: COL7A1; (-) strand; PAM type: YTN; PAM sequence: CTG
gcgccacaggatacagggtt

SEQ ID NO: 27496 - DNA, 20 bp, Artificial Sequence
  Description of Artificial Sequence: Synthetic oligonucleotide
  Target: COL7A1; (-) strand; PAM type: YTN; PAM sequence: TTC
ctggcgccacaggatacagg

SEQ ID NO: 27497 - DNA, 20 bp, Artificial Sequence
  Description of Artificial Sequence: Synthetic oligonucleotide
  Target: COL7A1; (-) strand; PAM type: YTN; PAM sequence: CTG
gaccagggttcctggcgcca

SEQ ID NO: 27498 - DNA, 20 bp, Artificial Sequence
  Description of Artificial Sequence: Synthetic oligonucleotide
  Target: COL7A1; (-) strand; PAM type: YTN; PAM sequence: TTA
cctggaccagggttcctggc

SEQ ID NO: 27499 - DNA, 20 bp, Artificial Sequence
  Description of Artificial Sequence: Synthetic oligonucleotide
  Target: COL7A1; (-) strand; PAM type: YTN; PAM sequence: CTG
tcaccattacctggaccagg

SEQ ID NO: 27500 - DNA, 20 bp, Artificial Sequence
  Description of Artificial Sequence: Synthetic oligonucleotide
  Target: COL7A1; (-) strand; PAM type: YTN; PAM sequence: CTC
atctgtcaccattacctgga

SEQ ID NO: 27501 - DNA, 20 bp, Artificial Sequence
  Description of Artificial Sequence: Synthetic oligonucleotide
  Target: COL7A1; (-) strand; PAM type: YTN; PAM sequence: CTC
aggccagcagctcatctgtc

SEQ ID NO: 27502 - DNA, 20 bp, Artificial Sequence
  Description of Artificial Sequence: Synthetic oligonucleotide
  Target: COL7A1; (-) strand; PAM type: YTN; PAM sequence: CTG
ggcccagtgaggacggtcca

SEQ ID NO: 27503 - DNA, 20 bp, Artificial Sequence
  Description of Artificial Sequence: Synthetic oligonucleotide
  Target: COL7A1; (-) strand; PAM type: YTN; PAM sequence: CTA
gacccactgggcccagtgag

SEQ ID NO: 27504 - DNA, 20 bp, Artificial Sequence
  Description of Artificial Sequence: Synthetic oligonucleotide
  Target: COL7A1; (-) strand; PAM type: YTN; PAM sequence: CTC
cccactagacccactgggcc

SEQ ID NO: 27505 - DNA, 20 bp, Artificial Sequence
  Description of Artificial Sequence: Synthetic oligonucleotide
  Target: COL7A1; (-) strand; PAM type: YTN; PAM sequence: CTC
tccccactagacccactggg

SEQ ID NO: 27506 - DNA, 20 bp, Artificial Sequence
  Description of Artificial Sequence: Synthetic oligonucleotide
  Target: COL7A1; (-) strand; PAM type: YTN; PAM sequence: TTG
cctctccccactagacccac

SEQ ID NO: 27507 - DNA, 20 bp, Artificial Sequence
  Description of Artificial Sequence: Synthetic oligonucleotide
  Target: COL7A1; (-) strand; PAM type: YTN; PAM sequence: CTC
cccattgcctctccccacta

SEQ ID NO: 27508 - DNA, 20 bp, Artificial Sequence
  Description of Artificial Sequence: Synthetic oligonucleotide
  Target: COL7A1; (-) strand; PAM type: YTN; PAM sequence: TTC
cagcagactccccattgcct

SEQ ID NO: 27509 - DNA, 20 bp, Artificial Sequence
  Description of Artificial Sequence: Synthetic oligonucleotide
  Target: COL7A1; (-) strand; PAM type: YTN; PAM sequence: CTG
ttccagcagactccccattg

SEQ ID NO: 27510 - DNA, 20 bp, Artificial Sequence
  Description of Artificial Sequence: Synthetic oligonucleotide
  Target: COL7A1; (-) strand; PAM type: YTN; PAM sequence: CTG
cctgttccagcagactcccc

SEQ ID NO: 27511 - DNA, 20 bp, Artificial Sequence
  Description of Artificial Sequence: Synthetic oligonucleotide
  Target: COL7A1; (-) strand; PAM type: YTN; PAM sequence: TTC
ctgcctgttccagcagactc

SEQ ID NO: 27512 - DNA, 20 bp, Artificial Sequence
  Description of Artificial Sequence: Synthetic oligonucleotide
  Target: COL7A1; (-) strand; PAM type: YTN; PAM sequence: CTT
cctgcctgttccagcagact

SEQ ID NO: 27513 - DNA, 20 bp, Artificial Sequence
  Description of Artificial Sequence: Synthetic oligonucleotide
  Target: COL7A1; (-) strand; PAM type: YTN; PAM sequence: CTC
cttcctgcctgttccagcag

SEQ ID NO: 27514 - DNA, 20 bp, Artificial Sequence
  Description of Artificial Sequence: Synthetic oligonucleotide
  Target: COL7A1; (-) strand; PAM type: YTN; PAM sequence: CTA
tcagatagccccactccttc

SEQ ID NO: 27515 - DNA, 20 bp, Artificial Sequence
  Description of Artificial Sequence: Synthetic oligonucleotide
  Target: COL7A1; (-) strand; PAM type: YTN; PAM sequence: TTC
ccctatcagatagccccact

SEQ ID NO: 27516 - DNA, 20 bp, Artificial Sequence
  Description of Artificial Sequence: Synthetic oligonucleotide
  Target: COL7A1; (-) strand; PAM type: YTN; PAM sequence: CTT
cccctatcagatagccccac

SEQ ID NO: 27517 - DNA, 20 bp, Artificial Sequence
  Description of Artificial Sequence: Synthetic oligonucleotide
  Target: COL7A1; (-) strand; PAM type: YTN; PAM sequence: CTC
ccatcatcttcccctatcag

SEQ ID NO: 27518 - DNA, 20 bp, Artificial Sequence
  Description of Artificial Sequence: Synthetic oligonucleotide
  Target: COL7A1; (-) strand; PAM type: YTN; PAM sequence: TTA
gactcccatcatcttcccct

SEQ ID NO: 27519 - DNA, 20 bp, Artificial Sequence
  Description of Artificial Sequence: Synthetic oligonucleotide
  Target: COL7A1; (-) strand; PAM type: YTN; PAM sequence: CTG
ttagactcccatcatcttcc

SEQ ID NO: 27520 - DNA, 20 bp, Artificial Sequence
  Description of Artificial Sequence: Synthetic oligonucleotide
  Target: COL7A1; (-) strand; PAM type: YTN; PAM sequence: CTC
ctgttagactcccatcatct

SEQ ID NO: 27521 - DNA, 20 bp, Artificial Sequence
  Description of Artificial Sequence: Synthetic oligonucleotide
  Target: COL7A1; (-) strand; PAM type: YTN; PAM sequence: TTC
ccgtctcctgttagactccc

SEQ ID NO: 27522 - DNA, 20 bp, Artificial Sequence
  Description of Artificial Sequence: Synthetic oligonucleotide
  Target: COL7A1; (-) strand; PAM type: YTN; PAM sequence: CTA
tcaaattcccgtctcctgtt

SEQ ID NO: 27523 - DNA, 20 bp, Artificial Sequence
  Description of Artificial Sequence: Synthetic oligonucleotide
  Target: COL7A1; (-) strand; PAM type: YTN; PAM sequence: CTC
tatcaaattcccgtctcctg

SEQ ID NO: 27524 - DNA, 20 bp, Artificial Sequence
  Description of Artificial Sequence: Synthetic oligonucleotide
  Target: COL7A1; (-) strand; PAM type: YTN; PAM sequence: CTC
ctctatcaaattcccgtctc

SEQ ID NO: 27525 - DNA, 20 bp, Artificial Sequence
  Description of Artificial Sequence: Synthetic oligonucleotide
  Target: COL7A1; (-) strand; PAM type: YTN; PAM sequence: TTC
accatctcctctatcaaatt

SEQ ID NO: 27526 - DNA, 20 bp, Artificial Sequence
  Description of Artificial Sequence: Synthetic oligonucleotide
  Target: COL7A1; (-) strand; PAM type: YTN; PAM sequence: CTA
ttcaccatctcctctatcaa

SEQ ID NO: 27527 - DNA, 20 bp, Artificial Sequence
  Description of Artificial Sequence: Synthetic oligonucleotide
  Target: COL7A1; (-) strand; PAM type: YTN; PAM sequence: CTG
gacctattcaccatctcctc

SEQ ID NO: 27528 - DNA, 20 bp, Artificial Sequence
  Description of Artificial Sequence: Synthetic oligonucleotide
  Target: COL7A1; (-) strand; PAM type: YTN; PAM sequence: CTC
cactggacctattcaccatc

SEQ ID NO: 27529 - DNA, 20 bp, Artificial Sequence
  Description of Artificial Sequence: Synthetic oligonucleotide
  Target: COL7A1; (-) strand; PAM type: YTN; PAM sequence: CTC
ctccactggacctattcacc

SEQ ID NO: 27530 - DNA, 20 bp, Artificial Sequence
  Description of Artificial Sequence: Synthetic oligonucleotide
  Target: COL7A1; (-) strand; PAM type: YTN; PAM sequence: CTC
cccactcctccactggacct

SEQ ID NO: 27531 - DNA, 20 bp, Artificial Sequence
  Description of Artificial Sequence: Synthetic oligonucleotide
  Target: COL7A1; (-) strand; PAM type: YTN; PAM sequence: CTC
cacctccccactcctccact

SEQ ID NO: 27532 - DNA, 20 bp, Artificial Sequence
  Description of Artificial Sequence: Synthetic oligonucleotide
  Target: COL7A1; (-) strand; PAM type: YTN; PAM sequence: CTA
aaacctccacctccccactc

SEQ ID NO: 27533 - DNA, 20 bp, Artificial Sequence
  Description of Artificial Sequence: Synthetic oligonucleotide
  Target: COL7A1; (-) strand; PAM type: YTN; PAM sequence: TTC
ctaaaacctccacctcccca

SEQ ID NO: 27534 - DNA, 20 bp, Artificial Sequence
  Description of Artificial Sequence: Synthetic oligonucleotide
  Target: COL7A1; (-) strand; PAM type: YTN; PAM sequence: CTT
cctaaaacctccacctcccc

SEQ ID NO: 27535 - DNA, 20 bp, Artificial Sequence
  Description of Artificial Sequence: Synthetic oligonucleotide
  Target: COL7A1; (-) strand; PAM type: YTN; PAM sequence: CTG
cttcctaaaacctccacctc

SEQ ID NO: 27536 - DNA, 20 bp, Artificial Sequence
  Description of Artificial Sequence: Synthetic oligonucleotide
  Target: COL7A1; (-) strand; PAM type: YTN; PAM sequence: CTC
actgcttcctaaaacctcca

SEQ ID NO: 27537 - DNA, 20 bp, Artificial Sequence
  Description of Artificial Sequence: Synthetic oligonucleotide
  Target: COL7A1; (-) strand; PAM type: YTN; PAM sequence: CTG
ctcactgcttcctaaaacct

SEQ ID NO: 27538 - DNA, 20 bp, Artificial Sequence
  Description of Artificial Sequence: Synthetic oligonucleotide
  Target: COL7A1; (-) strand; PAM type: YTN; PAM sequence: CTC
catcagacctgctcactgct

SEQ ID NO: 27539 - DNA, 20 bp, Artificial Sequence
  Description of Artificial Sequence: Synthetic oligonucleotide
  Target: COL7A1; (-) strand; PAM type: YTN; PAM sequence: CTC
ctccatcagacctgctcact

SEQ ID NO: 27540 - DNA, 20 bp, Artificial Sequence
  Description of Artificial Sequence: Synthetic oligonucleotide
  Target: COL7A1; (-) strand; PAM type: YTN; PAM sequence: TTC
tcctccatcagacctgctca

SEQ ID NO: 27541 - DNA, 20 bp, Artificial Sequence
  Description of Artificial Sequence: Synthetic oligonucleotide
  Target: COL7A1; (-) strand; PAM type: YTN; PAM sequence: TTT
ctcctccatcagacctgctc

SEQ ID NO: 27542 - DNA, 20 bp, Artificial Sequence
  Description of Artificial Sequence: Synthetic oligonucleotide
  Target: COL7A1; (-) strand; PAM type: YTN; PAM sequence: CTT
tctcctccatcagacctgct

SEQ ID NO: 27543 - DNA, 20 bp, Artificial Sequence
  Description of Artificial Sequence: Synthetic oligonucleotide
  Target: COL7A1; (-) strand; PAM type: YTN; PAM sequence: TTA
cactttctcctccatcagac

SEQ ID NO: 27544 - DNA, 20 bp, Artificial Sequence
  Description of Artificial Sequence: Synthetic oligonucleotide
  Target: COL7A1; (-) strand; PAM type: YTN; PAM sequence: TTT
acactttctcctccatcaga

SEQ ID NO: 27545 - DNA, 20 bp, Artificial Sequence
  Description of Artificial Sequence: Synthetic oligonucleotide
  Target: COL7A1; (-) strand; PAM type: YTN; PAM sequence: CTG
agatttacactttctcctcc

SEQ ID NO: 27546 - DNA, 20 bp, Artificial Sequence
  Description of Artificial Sequence: Synthetic oligonucleotide
  Target: COL7A1; (-) strand; PAM type: YTN; PAM sequence: CTC
tgagatttacactttctcct

SEQ ID NO: 27547 - DNA, 20 bp, Artificial Sequence
  Description of Artificial Sequence: Synthetic oligonucleotide
  Target: COL7A1; (-) strand; PAM type: YTN; PAM sequence: CTC
ctctgagatttacactttct

SEQ ID NO: 27548 - DNA, 20 bp, Artificial Sequence
  Description of Artificial Sequence: Synthetic oligonucleotide
  Target: COL7A1; (-) strand; PAM type: YTN; PAM sequence: CTG
gacccaaatctcctctgaga

SEQ ID NO: 27549 - DNA, 20 bp, Artificial Sequence
  Description of Artificial Sequence: Synthetic oligonucleotide
  Target: COL7A1; (-) strand; PAM type: YTN; PAM sequence: TTG
ctggacccaaatctcctctg

SEQ ID NO: 27550 - DNA, 20 bp, Artificial Sequence
  Description of Artificial Sequence: Synthetic oligonucleotide
  Target: COL7A1; (-) strand; PAM type: YTN; PAM sequence: TTT
gctggacccaaatctcctct

SEQ ID NO: 27551 - DNA, 20 bp, Artificial Sequence
  Description of Artificial Sequence: Synthetic oligonucleotide
  Target: COL7A1; (-) strand; PAM type: YTN; PAM sequence: TTT
tgctggacccaaatctcctc

SEQ ID NO: 27552 - DNA, 20 bp, Artificial Sequence
  Description of Artificial Sequence: Synthetic oligonucleotide
  Target: COL7A1; (-) strand; PAM type: YTN; PAM sequence: TTT
ttgctggacccaaatctcct

SEQ ID NO: 27553 - DNA, 20 bp, Artificial Sequence
  Description of Artificial Sequence: Synthetic oligonucleotide
  Target: COL7A1; (-) strand; PAM type: YTN; PAM sequence: TTT
tttgctggacccaaatctcc

SEQ ID NO: 27554 - DNA, 20 bp, Artificial Sequence
  Description of Artificial Sequence: Synthetic oligonucleotide
  Target: COL7A1; (-) strand; PAM type: YTN; PAM sequence: CTT
ttttgctggacccaaatctc

SEQ ID NO: 27555 - DNA, 20 bp, Artificial Sequence
  Description of Artificial Sequence: Synthetic oligonucleotide
  Target: COL7A1; (-) strand; PAM type: YTN; PAM sequence: CTC
agacccccatcccttttttg

SEQ ID NO: 27556 - DNA, 20 bp, Artificial Sequence
  Description of Artificial Sequence: Synthetic oligonucleotide
  Target: COL7A1; (-) strand; PAM type: YTN; PAM sequence: TTC
aaccctcagacccccatccc

SEQ ID NO: 27557 - DNA, 20 bp, Artificial Sequence
  Description of Artificial Sequence: Synthetic oligonucleotide
  Target: COL7A1; (-) strand; PAM type: YTN; PAM sequence: CTT
caaccctcagacccccatcc

SEQ ID NO: 27558 - DNA, 20 bp, Artificial Sequence
  Description of Artificial Sequence: Synthetic oligonucleotide
  Target: COL7A1; (-) strand; PAM type: YTN; PAM sequence: CTC
aaatatccaccacttcaacc

SEQ ID NO: 27559 - DNA, 20 bp, Artificial Sequence
  Description of Artificial Sequence: Synthetic oligonucleotide
  Target: COL7A1; (-) strand; PAM type: YTN; PAM sequence: TTG
ccctcaaatatccaccactt

SEQ ID NO: 27560 - DNA, 20 bp, Artificial Sequence
  Description of Artificial Sequence: Synthetic oligonucleotide
  Target: COL7A1; (-) strand; PAM type: YTN; PAM sequence: TTT
gccctcaaatatccaccact

SEQ ID NO: 27561 - DNA, 20 bp, Artificial Sequence
  Description of Artificial Sequence: Synthetic oligonucleotide
  Target: COL7A1; (-) strand; PAM type: YTN; PAM sequence: CTT
tgccctcaaatatccaccac

SEQ ID NO: 27562 - DNA, 20 bp, Artificial Sequence
  Description of Artificial Sequence: Synthetic oligonucleotide
  Target: COL7A1; (-) strand; PAM type: YTN; PAM sequence: CTC
ccacagcctttgccctcaaa

SEQ ID NO: 27563 - DNA, 20 bp, Artificial Sequence
  Description of Artificial Sequence: Synthetic oligonucleotide
  Target: COL7A1; (-) strand; PAM type: YTN; PAM sequence: CTA
agactcccacagcctttgcc

SEQ ID NO: 27564 - DNA, 20 bp, Artificial Sequence
  Description of Artificial Sequence: Synthetic oligonucleotide
  Target: COL7A1; (-) strand; PAM type: YTN; PAM sequence: CTC
ctaagactcccacagccttt

SEQ ID NO: 27565 - DNA, 20 bp, Artificial Sequence
  Description of Artificial Sequence: Synthetic oligonucleotide
  Target: COL7A1; (-) strand; PAM type: YTN; PAM sequence: CTC
tcctaagactcccacagcct

SEQ ID NO: 27566 - DNA, 20 bp, Artificial Sequence
  Description of Artificial Sequence: Synthetic oligonucleotide
  Target: COL7A1; (-) strand; PAM type: YTN; PAM sequence: TTC
tctcctaagactcccacagc

SEQ ID NO: 27567 - DNA, 20 bp, Artificial Sequence
  Description of Artificial Sequence: Synthetic oligonucleotide
  Target: COL7A1; (-) strand; PAM type: YTN; PAM sequence: CTT
ctctcctaagactcccacag

SEQ ID NO: 27568 - DNA, 20 bp, Artificial Sequence
  Description of Artificial Sequence: Synthetic oligonucleotide
  Target: COL7A1; (-) strand; PAM type: YTN; PAM sequence: CTC
cgcttctctcctaagactcc

SEQ ID NO: 27569 - DNA, 20 bp, Artificial Sequence
  Description of Artificial Sequence: Synthetic oligonucleotide
  Target: COL7A1; (-) strand; PAM type: YTN; PAM sequence: TTC
ctccgcttctctcctaagac

SEQ ID NO: 27570 - DNA, 20 bp, Artificial Sequence
  Description of Artificial Sequence: Synthetic oligonucleotide
  Target: COL7A1; (-) strand; PAM type: YTN; PAM sequence: TTC
agattcctccgcttctctcc

SEQ ID NO: 27571 - DNA, 20 bp, Artificial Sequence
  Description of Artificial Sequence: Synthetic oligonucleotide
  Target: COL7A1; (-) strand; PAM type: YTN; PAM sequence: CTC
cccgtattcagattcctccg

SEQ ID NO: 27572 - DNA, 20 bp, Artificial Sequence
  Description of Artificial Sequence: Synthetic oligonucleotide
  Target: COL7A1; (-) strand; PAM type: YTN; PAM sequence: TTA
agccctccccgtattcagat

SEQ ID NO: 27573 - DNA, 20 bp, Artificial Sequence
  Description of Artificial Sequence: Synthetic oligonucleotide
  Target: COL7A1; (-) strand; PAM type: YTN; PAM sequence: CTT
aagccctccccgtattcaga

SEQ ID NO: 27574 - DNA, 20 bp, Artificial Sequence
  Description of Artificial Sequence: Synthetic oligonucleotide
  Target: COL7A1; (-) strand; PAM type: YTN; PAM sequence: CTC
cccttaagccctccccgtat

SEQ ID NO: 27575 - DNA, 20 bp, Artificial Sequence
  Description of Artificial Sequence: Synthetic oligonucleotide
  Target: COL7A1; (-) strand; PAM type: YTN; PAM sequence: CTG
tctccccttaagccctcccc

SEQ ID NO: 27576 - DNA, 20 bp, Artificial Sequence
  Description of Artificial Sequence: Synthetic oligonucleotide
  Target: COL7A1; (-) strand; PAM type: YTN; PAM sequence: TTC
agctgtctccccttaagccc

SEQ ID NO: 27577 - DNA, 20 bp, Artificial Sequence
  Description of Artificial Sequence: Synthetic oligonucleotide
  Target: COL7A1; (-) strand; PAM type: YTN; PAM sequence: TTT
cagctgtctccccttaagcc

SEQ ID NO: 27578 - DNA, 20 bp, Artificial Sequence
  Description of Artificial Sequence: Synthetic oligonucleotide
  Target: COL7A1; (-) strand; PAM type: YTN; PAM sequence: TTC
agtttcagctgtctcccctt

SEQ ID NO: 27579 - DNA, 20 bp, Artificial Sequence
  Description of Artificial Sequence: Synthetic oligonucleotide
  Target: COL7A1; (-) strand; PAM type: YTN; PAM sequence: CTT
cagtttcagctgtctcccct

SEQ ID NO: 27580 - DNA, 20 bp, Artificial Sequence
  Description of Artificial Sequence: Synthetic oligonucleotide
  Target: COL7A1; (-) strand; PAM type: YTN; PAM sequence: CTC
ttcagtttcagctgtctccc

SEQ ID NO: 27581 - DNA, 20 bp, Artificial Sequence
  Description of Artificial Sequence: Synthetic oligonucleotide
  Target: COL7A1; (-) strand; PAM type: YTN; PAM sequence: TTC
ctcttcagtttcagctgtct

SEQ ID NO: 27582 - DNA, 20 bp, Artificial Sequence
  Description of Artificial Sequence: Synthetic oligonucleotide
  Target: COL7A1; (-) strand; PAM type: YTN; PAM sequence: CTT
cctcttcagtttcagctgtc

SEQ ID NO: 27583 - DNA, 20 bp, Artificial Sequence
  Description of Artificial Sequence: Synthetic oligonucleotide
  Target: COL7A1; (-) strand; PAM type: YTN; PAM sequence: CTG
cttcctcttcagtttcagct

SEQ ID NO: 27584 - DNA, 20 bp, Artificial Sequence
  Description of Artificial Sequence: Synthetic oligonucleotide
  Target: COL7A1; (-) strand; PAM type: YTN; PAM sequence: CTC
agagacgctgcttcctcttc

SEQ ID NO: 27585 - DNA, 20 bp, Artificial Sequence
  Description of Artificial Sequence: Synthetic oligonucleotide
  Target: COL7A1; (-) strand; PAM type: YTN; PAM sequence: CTC
cctcagagacgctgcttcct

SEQ ID NO: 27586 - DNA, 20 bp, Artificial Sequence
  Description of Artificial Sequence: Synthetic oligonucleotide
  Target: COL7A1; (-) strand; PAM type: YTN; PAM sequence: CTC
ctccctcagagacgctgctt

SEQ ID NO: 27587 - DNA, 20 bp, Artificial Sequence
  Description of Artificial Sequence: Synthetic oligonucleotide
  Target: COL7A1; (-) strand; PAM type: YTN; PAM sequence: CTC
cctcctccctcagagacgct

SEQ ID NO: 27588 - DNA, 20 bp, Artificial Sequence
  Description of Artificial Sequence: Synthetic oligonucleotide
  Target: COL7A1; (-) strand; PAM type: YTN; PAM sequence: TTC
agaatcccactccctcctcc

SEQ ID NO: 27589 - DNA, 20 bp, Artificial Sequence
  Description of Artificial Sequence: Synthetic oligonucleotide
  Target: COL7A1; (-) strand; PAM type: YTN; PAM sequence: CTT
cagaatcccactccctcctc

SEQ ID NO: 27590 - DNA, 20 bp, Artificial Sequence
  Description of Artificial Sequence: Synthetic oligonucleotide
  Target: COL7A1; (-) strand; PAM type: YTN; PAM sequence: CTC
ccccttcagaatcccactcc

SEQ ID NO: 27591 - DNA, 20 bp, Artificial Sequence
  Description of Artificial Sequence: Synthetic oligonucleotide
  Target: COL7A1; (-) strand; PAM type: YTN; PAM sequence: CTG
cctcccccttcagaatccca

SEQ ID NO: 27592 - DNA, 20 bp, Artificial Sequence
  Description of Artificial Sequence: Synthetic oligonucleotide
  Target: COL7A1; (-) strand; PAM type: YTN; PAM sequence: CTC
ctgcctcccccttcagaatc

SEQ ID NO: 27593 - DNA, 20 bp, Artificial Sequence
  Description of Artificial Sequence: Synthetic oligonucleotide
  Target: COL7A1; (-) strand; PAM type: YTN; PAM sequence: CTC
cccagaactcctgcctcccc

SEQ ID NO: 27594 - DNA, 20 bp, Artificial Sequence
  Description of Artificial Sequence: Synthetic oligonucleotide
  Target: COL7A1; (-) strand; PAM type: YTN; PAM sequence: TTC
tccccagaactcctgcctcc

SEQ ID NO: 27595 - DNA, 20 bp, Artificial Sequence
  Description of Artificial Sequence: Synthetic oligonucleotide
  Target: COL7A1; (-) strand; PAM type: YTN; PAM sequence: CTT
ctccccagaactcctgcctc

SEQ ID NO: 27596 - DNA, 20 bp, Artificial Sequence
  Description of Artificial Sequence: Synthetic oligonucleotide
  Target: COL7A1; (-) strand; PAM type: YTN; PAM sequence: TTG
cttctccccagaactcctgc

SEQ ID NO: 27597 - DNA, 20 bp, Artificial Sequence
  Description of Artificial Sequence: Synthetic oligonucleotide
  Target: COL7A1; (-) strand; PAM type: YTN; PAM sequence: CTT
gcttctccccagaactcctg

SEQ ID NO: 27598 - DNA, 20 bp, Artificial Sequence
  Description of Artificial Sequence: Synthetic oligonucleotide
  Target: COL7A1; (-) strand; PAM type: YTN; PAM sequence: TTG
cagacccttgcttctcccca

SEQ ID NO: 27599 - DNA, 20 bp, Artificial Sequence
  Description of Artificial Sequence: Synthetic oligonucleotide
  Target: COL7A1; (-) strand; PAM type: YTN; PAM sequence: CTT
gcagacccttgcttctcccc

SEQ ID NO: 27600 - DNA, 20 bp, Artificial Sequence
  Description of Artificial Sequence: Synthetic oligonucleotide
  Target: COL7A1; (-) strand; PAM type: YTN; PAM sequence: TTC
ccttgcagacccttgcttct

SEQ ID NO: 27601 - DNA, 20 bp, Artificial Sequence
  Description of Artificial Sequence: Synthetic oligonucleotide
  Target: COL7A1; (-) strand; PAM type: YTN; PAM sequence: CTT
cccttgcagacccttgcttc

SEQ ID NO: 27602 - DNA, 20 bp, Artificial Sequence
  Description of Artificial Sequence: Synthetic oligonucleotide
  Target: COL7A1; (-) strand; PAM type: YTN; PAM sequence: TTC
agacccccatgccttccctt

SEQ ID NO: 27603 - DNA, 20 bp, Artificial Sequence
  Description of Artificial Sequence: Synthetic oligonucleotide
  Target: COL7A1; (-) strand; PAM type: YTN; PAM sequence: TTT
cagacccccatgccttccct

SEQ ID NO: 27604 - DNA, 20 bp, Artificial Sequence
  Description of Artificial Sequence: Synthetic oligonucleotide
  Target: COL7A1; (-) strand; PAM type: YTN; PAM sequence: CTT
tcagacccccatgccttccc

SEQ ID NO: 27605 - DNA, 20 bp, Artificial Sequence
  Description of Artificial Sequence: Synthetic oligonucleotide
  Target: COL7A1; (-) strand; PAM type: YTN; PAM sequence: CTC
tttcagacccccatgccttc

SEQ ID NO: 27606 - DNA, 20 bp, Artificial Sequence
  Description of Artificial Sequence: Synthetic oligonucleotide
  Target: COL7A1; (-) strand; PAM type: YTN; PAM sequence: TTG
ctctttcagacccccatgcc

SEQ ID NO: 27607 - DNA, 20 bp, Artificial Sequence
  Description of Artificial Sequence: Synthetic oligonucleotide
  Target: COL7A1; (-) strand; PAM type: YTN; PAM sequence: CTC
cattgctctttcagaccccc

SEQ ID NO: 27608 - DNA, 20 bp, Artificial Sequence
  Description of Artificial Sequence: Synthetic oligonucleotide
  Target: COL7A1; (-) strand; PAM type: YTN; PAM sequence: CTG
cctccattgctctttcagac

SEQ ID NO: 27609 - DNA, 20 bp, Artificial Sequence
  Description of Artificial Sequence: Synthetic oligonucleotide
  Target: COL7A1; (-) strand; PAM type: YTN; PAM sequence: CTC
tgcctccattgctctttcag

SEQ ID NO: 27610 - DNA, 20 bp, Artificial Sequence
  Description of Artificial Sequence: Synthetic oligonucleotide
  Target: COL7A1; (-) strand; PAM type: YTN; PAM sequence: CTC
tctgcctccattgctctttc

SEQ ID NO: 27611 - DNA, 20 bp, Artificial Sequence
  Description of Artificial Sequence: Synthetic oligonucleotide
  Target: COL7A1; (-) strand; PAM type: YTN; PAM sequence: TTG
gctctctgcctccattgctc

SEQ ID NO: 27612 - DNA, 20 bp, Artificial Sequence
  Description of Artificial Sequence: Synthetic oligonucleotide
  Target: COL7A1; (-) strand; PAM type: YTN; PAM sequence: CTT
ggctctctgcctccattgct

SEQ ID NO: 27613 - DNA, 20 bp, Artificial Sequence
  Description of Artificial Sequence: Synthetic oligonucleotide
  Target: COL7A1; (-) strand; PAM type: YTN; PAM sequence: CTG
cccccgtcccttggctctct

SEQ ID NO: 27614 - DNA, 20 bp, Artificial Sequence
  Description of Artificial Sequence: Synthetic oligonucleotide
  Target: COL7A1; (-) strand; PAM type: YTN; PAM sequence: CTC
gaacgggtcaggccctgccc

SEQ ID NO: 27615 - DNA, 20 bp, Artificial Sequence
  Description of Artificial Sequence: Synthetic oligonucleotide
  Target: COL7A1; (-) strand; PAM type: YTN; PAM sequence: CTG
cagtcatcgtggctcgaacg

SEQ ID NO: 27616 - DNA, 20 bp, Artificial Sequence
  Description of Artificial Sequence: Synthetic oligonucleotide
  Target: COL7A1; (-) strand; PAM type: YTN; PAM sequence: CTG
ctgcagtcatcgtggctcga

SEQ ID NO: 27617 - DNA, 20 bp, Artificial Sequence
  Description of Artificial Sequence: Synthetic oligonucleotide
  Target: COL7A1; (-) strand; PAM type: YTN; PAM sequence: CTG
cgaggcagagaggagggccc

SEQ ID NO: 27618 - DNA, 20 bp, Artificial Sequence
  Description of Artificial Sequence: Synthetic oligonucleotide
  Target: COL7A1; (-) strand; PAM type: YTN; PAM sequence: CTG
tgtcggtactgcgaggcaga

SEQ ID NO: 27619 - DNA, 20 bp, Artificial Sequence
  Description of Artificial Sequence: Synthetic oligonucleotide
  Target: COL7A1; (-) strand; PAM type: YTN; PAM sequence: CTA
ccaggtggctgtgtcggtac

SEQ ID NO: 27620 - DNA, 20 bp, Artificial Sequence
  Description of Artificial Sequence: Synthetic oligonucleotide
  Target: COL7A1; (-) strand; PAM type: YTN; PAM sequence: CTG
gaaccacctaccaggtggct

SEQ ID NO: 27621 - DNA, 20 bp, Artificial Sequence
  Description of Artificial Sequence: Synthetic oligonucleotide
  Target: COL7A1; (-) strand; PAM type: YTN; PAM sequence: CTG
cagcctggaaccacctacca

SEQ ID NO: 27622 - DNA, 20 bp, Artificial Sequence
  Description of Artificial Sequence: Synthetic oligonucleotide
  Target: COL7A1; (-) strand; PAM type: YTN; PAM sequence: CTG
ccacagacatcacagggctg

SEQ ID NO: 27623 - DNA, 20 bp, Artificial Sequence
  Description of Artificial Sequence: Synthetic oligonucleotide
  Target: COL7A1; (-) strand; PAM type: YTN; PAM sequence: CTA
ctgccacagacatcacaggg

SEQ ID NO: 27624 - DNA, 20 bp, Artificial Sequence
  Description of Artificial Sequence: Synthetic oligonucleotide
  Target: COL7A1; (-) strand; PAM type: YTN; PAM sequence: CTC
tactgccacagacatcacag

SEQ ID NO: 27625 - DNA, 20 bp, Artificial Sequence
  Description of Artificial Sequence: Synthetic oligonucleotide
  Target: COL7A1; (-) strand; PAM type: YTN; PAM sequence: CTG
cccccagactctactgccac

SEQ ID NO: 27626 - DNA, 20 bp, Artificial Sequence
  Description of Artificial Sequence: Synthetic oligonucleotide
  Target: COL7A1; (-) strand; PAM type: YTN; PAM sequence: CTC
aggtccggagtccagccaga

SEQ ID NO: 27627 - DNA, 20 bp, Artificial Sequence
  Description of Artificial Sequence: Synthetic oligonucleotide
  Target: COL7A1; (-) strand; PAM type: YTN; PAM sequence: CTG
acctcaggtccggagtccag

SEQ ID NO: 27628 - DNA, 20 bp, Artificial Sequence
  Description of Artificial Sequence: Synthetic oligonucleotide
  Target: COL7A1; (-) strand; PAM type: YTN; PAM sequence: CTC
tgacctcaggtccggagtcc

SEQ ID NO: 27629 - DNA, 20 bp, Artificial Sequence
  Description of Artificial Sequence: Synthetic oligonucleotide
  Target: COL7A1; (-) strand; PAM type: YTN; PAM sequence: TTC
cctctgacctcaggtccgga

SEQ ID NO: 27630 - DNA, 20 bp, Artificial Sequence
  Description of Artificial Sequence: Synthetic oligonucleotide
  Target: COL7A1; (-) strand; PAM type: YTN; PAM sequence: TTT
ccctctgacctcaggtccgg

SEQ ID NO: 27631 - DNA, 20 bp, Artificial Sequence
  Description of Artificial Sequence: Synthetic oligonucleotide
  Target: COL7A1; (-) strand; PAM type: YTN; PAM sequence: CTG
ccaaagggaccaatgagggt

SEQ ID NO: 27632 - DNA, 20 bp, Artificial Sequence
  Description of Artificial Sequence: Synthetic oligonucleotide
  Target: COL7A1; (-) strand; PAM type: YTN; PAM sequence: CTG
gagcacaggcagtggtcagt

SEQ ID NO: 27633 - DNA, 20 bp, Artificial Sequence
  Description of Artificial Sequence: Synthetic oligonucleotide
  Target: COL7A1; (-) strand; PAM type: YTN; PAM sequence: TTA
gctggagcacaggcagtggt

SEQ ID NO: 27634 - DNA, 20 bp, Artificial Sequence
  Description of Artificial Sequence: Synthetic oligonucleotide
  Target: COL7A1; (-) strand; PAM type: YTN; PAM sequence: TTC
ggattagctggagcacaggc

SEQ ID NO: 27635 - DNA, 20 bp, Artificial Sequence
  Description of Artificial Sequence: Synthetic oligonucleotide
  Target: COL7A1; (-) strand; PAM type: YTN; PAM sequence: TTT
cggattagctggagcacagg

SEQ ID NO: 27636 - DNA, 20 bp, Artificial Sequence
  Description of Artificial Sequence: Synthetic oligonucleotide
  Target: COL7A1; (-) strand; PAM type: YTN; PAM sequence: CTG
gagccagtggatttcggatt

SEQ ID NO: 27637 - DNA, 20 bp, Artificial Sequence
  Description of Artificial Sequence: Synthetic oligonucleotide
  Target: COL7A1; (-) strand; PAM type: YTN; PAM sequence: CTG
gggacccgtccctggagcca

SEQ ID NO: 27638 - DNA, 20 bp, Artificial Sequence
  Description of Artificial Sequence: Synthetic oligonucleotide
  Target: COL7A1; (-) strand; PAM type: YTN; PAM sequence: TTG
tggtgtcagatgcaacgcga

SEQ ID NO: 27639 - DNA, 20 bp, Artificial Sequence
  Description of Artificial Sequence: Synthetic oligonucleotide
  Target: COL7A1; (-) strand; PAM type: YTN; PAM sequence: CTG
cgggttgtggtgtcagatgc

SEQ ID NO: 27640 - DNA, 20 bp, Artificial Sequence
  Description of Artificial Sequence: Synthetic oligonucleotide
  Target: COL7A1; (-) strand; PAM type: YTN; PAM sequence: TTC
cagggctgcgggttgtggtg

SEQ ID NO: 27641 - DNA, 20 bp, Artificial Sequence
  Description of Artificial Sequence: Synthetic oligonucleotide
  Target: COL7A1; (-) strand; PAM type: YTN; PAM sequence: CTG
ttccagggctgcgggttgtg

SEQ ID NO: 27642 - DNA, 20 bp, Artificial Sequence
  Description of Artificial Sequence: Synthetic oligonucleotide
  Target: COL7A1; (-) strand; PAM type: YTN; PAM sequence: TTG
ctgttccagggctgcgggtt

SEQ ID NO: 27643 - DNA, 20 bp, Artificial Sequence
  Description of Artificial Sequence: Synthetic oligonucleotide
  Target: COL7A1; (-) strand; PAM type: YTN; PAM sequence: CTT
gctgttccagggctgcgggt

SEQ ID NO: 27644 - DNA, 20 bp, Artificial Sequence
  Description of Artificial Sequence: Synthetic oligonucleotide
  Target: COL7A1; (-) strand; PAM type: YTN; PAM sequence: CTC
cacttgctgttccagggctg

SEQ ID NO: 27645 - DNA, 20 bp, Artificial Sequence
  Description of Artificial Sequence: Synthetic oligonucleotide
  Target: COL7A1; (-) strand; PAM type: YTN; PAM sequence: CTA
gagccggaaactccacttgc

SEQ ID NO: 27646 - DNA, 20 bp, Artificial Sequence
  Description of Artificial Sequence: Synthetic oligonucleotide
  Target: COL7A1; (-) strand; PAM type: YTN; PAM sequence: CTC
ctagagccggaaactccact

SEQ ID NO: 27647 - DNA, 20 bp, Artificial Sequence
  Description of Artificial Sequence: Synthetic oligonucleotide
  Target: COL7A1; (-) strand; PAM type: YTN; PAM sequence: CTG
taactcctagagccggaaac

SEQ ID NO: 27648 - DNA, 20 bp, Artificial Sequence
  Description of Artificial Sequence: Synthetic oligonucleotide
  Target: COL7A1; (-) strand; PAM type: YTN; PAM sequence: CTG
tctgtaactcctagagccgg

SEQ ID NO: 27649 - DNA, 20 bp, Artificial Sequence
  Description of Artificial Sequence: Synthetic oligonucleotide
  Target: COL7A1; (-) strand; PAM type: YTN; PAM sequence: TTC
tgtctgtaactcctagagcc

SEQ ID NO: 27650 - DNA, 20 bp, Artificial Sequence
  Description of Artificial Sequence: Synthetic oligonucleotide
  Target: COL7A1; (-) strand; PAM type: YTN; PAM sequence: CTT
ctgtctgtaactcctagagc

SEQ ID NO: 27651 - DNA, 20 bp, Artificial Sequence
  Description of Artificial Sequence: Synthetic oligonucleotide
  Target: COL7A1; (-) strand; PAM type: YTN; PAM sequence: CTG
acttctgtctgtaactccta

SEQ ID NO: 27652 - DNA, 20 bp, Artificial Sequence
  Description of Artificial Sequence: Synthetic oligonucleotide
  Target: COL7A1; (-) strand; PAM type: YTN; PAM sequence: TTC
tgacttctgtctgtaactcc

SEQ ID NO: 27653 - DNA, 20 bp, Artificial Sequence
  Description of Artificial Sequence: Synthetic oligonucleotide
  Target: COL7A1; (-) strand; PAM type: YTN; PAM sequence: CTT
ctgacttctgtctgtaactc

SEQ ID NO: 27654 - DNA, 20 bp, Artificial Sequence
  Description of Artificial Sequence: Synthetic oligonucleotide
  Target: COL7A1; (-) strand; PAM type: YTN; PAM sequence: CTG
acttctgacttctgtctgta

SEQ ID NO: 27655 - DNA, 20 bp, Artificial Sequence
  Description of Artificial Sequence: Synthetic oligonucleotide
  Target: COL7A1; (-) strand; PAM type: YTN; PAM sequence: TTC
tgacttctgacttctgtctg

SEQ ID NO: 27656 - DNA, 20 bp, Artificial Sequence
  Description of Artificial Sequence: Synthetic oligonucleotide
  Target: COL7A1; (-) strand; PAM type: YTN; PAM sequence: CTG
gttctgacttctgacttctg

SEQ ID NO: 27657 - DNA, 20 bp, Artificial Sequence
  Description of Artificial Sequence: Synthetic oligonucleotide
  Target: COL7A1; (-) strand; PAM type: YTN; PAM sequence: CTG
gtcctggttctgacttctga

SEQ ID NO: 27658 - DNA, 20 bp, Artificial Sequence
  Description of Artificial Sequence: Synthetic oligonucleotide
  Target: COL7A1; (-) strand; PAM type: YTN; PAM sequence: CTC
tggtcctggttctgacttct

SEQ ID NO: 27659 - DNA, 20 bp, Artificial Sequence
  Description of Artificial Sequence: Synthetic oligonucleotide
  Target: COL7A1; (-) strand; PAM type: YTN; PAM sequence: CTC
actctggtcctggttctgac

SEQ ID NO: 27660 - DNA, 20 bp, Artificial Sequence
  Description of Artificial Sequence: Synthetic oligonucleotide
  Target: COL7A1; (-) strand; PAM type: YTN; PAM sequence: CTG
cctcactctggtcctggttc

SEQ ID NO: 27661 - DNA, 20 bp, Artificial Sequence
  Description of Artificial Sequence: Synthetic oligonucleotide
  Target: COL7A1; (-) strand; PAM type: YTN; PAM sequence: CTG
cctgcctcactctggtcctg

SEQ ID NO: 27662 - DNA, 20 bp, Artificial Sequence
  Description of Artificial Sequence: Synthetic oligonucleotide
  Target: COL7A1; (-) strand; PAM type: YTN; PAM sequence: TTG
tggaggacagctgcctgcct

SEQ ID NO: 27663 - DNA, 20 bp, Artificial Sequence
  Description of Artificial Sequence: Synthetic oligonucleotide
  Target: COL7A1; (-) strand; PAM type: YTN; PAM sequence: CTT
gtggaggacagctgcctgcc

SEQ ID NO: 27664 - DNA, 20 bp, Artificial Sequence
  Description of Artificial Sequence: Synthetic oligonucleotide
  Target: COL7A1; (-) strand; PAM type: YTN; PAM sequence: CTG
caggaggcttgtggaggaca

SEQ ID NO: 27665 - DNA, 20 bp, Artificial Sequence
  Description of Artificial Sequence: Synthetic oligonucleotide
  Target: COL7A1; (-) strand; PAM type: YTN; PAM sequence: CTG
tccgccggggtgagtactgc

SEQ ID NO: 27666 - DNA, 20 bp, Artificial Sequence
  Description of Artificial Sequence: Synthetic oligonucleotide
  Target: COL7A1; (-) strand; PAM type: YTN; PAM sequence: CTC
actgtccgccggggtgagta

SEQ ID NO: 27667 - DNA, 20 bp, Artificial Sequence
  Description of Artificial Sequence: Synthetic oligonucleotide
  Target: COL7A1; (-) strand; PAM type: YTN; PAM sequence: CTC
gagtgggtccccgtgagggc

SEQ ID NO: 27668 - DNA, 20 bp, Artificial Sequence
  Description of Artificial Sequence: Synthetic oligonucleotide
  Target: COL7A1; (-) strand; PAM type: YTN; PAM sequence: CTG
ctcgagtgggtccccgtgag

SEQ ID NO: 27669 - DNA, 20 bp, Artificial Sequence
  Description of Artificial Sequence: Synthetic oligonucleotide
  Target: COL7A1; (-) strand; PAM type: YTN; PAM sequence: CTG
tgcgggtgtctgctcgagtg

SEQ ID NO: 27670 - DNA, 20 bp, Artificial Sequence
  Description of Artificial Sequence: Synthetic oligonucleotide
  Target: COL7A1; (-) strand; PAM type: YTN; PAM sequence: CTA
cactgtgcgggtgtctgctc

SEQ ID NO: 27671 - DNA, 20 bp, Artificial Sequence
  Description of Artificial Sequence: Synthetic oligonucleotide
  Target: COL7A1; (-) strand; PAM type: YTN; PAM sequence: TTA
gctacactgtgcgggtgtct

SEQ ID NO: 27672 - DNA, 20 bp, Artificial Sequence
  Description of Artificial Sequence: Synthetic oligonucleotide
  Target: COL7A1; (-) strand; PAM type: YTN; PAM sequence: CTT
agctacactgtgcgggtgtc

SEQ ID NO: 27673 - DNA, 20 bp, Artificial Sequence
  Description of Artificial Sequence: Synthetic oligonucleotide
  Target: COL7A1; (-) strand; PAM type: YTN; PAM sequence: CTG
ggcttagctacactgtgcgg

SEQ ID NO: 27674 - DNA, 20 bp, Artificial Sequence
  Description of Artificial Sequence: Synthetic oligonucleotide
  Target: COL7A1; (-) strand; PAM type: YTN; PAM sequence: TTC
aggctgggcttagctacact

SEQ ID NO: 27675 - DNA, 20 bp, Artificial Sequence
  Description of Artificial Sequence: Synthetic oligonucleotide
  Target: COL7A1; (-) strand; PAM type: YTN; PAM sequence: TTG
gatgacgttcaggctgggct

SEQ ID NO: 27676 - DNA, 20 bp, Artificial Sequence
  Description of Artificial Sequence: Synthetic oligonucleotide
  Target: COL7A1; (-) strand; PAM type: YTN; PAM sequence: CTT
ggatgacgttcaggctgggc

SEQ ID NO: 27677 - DNA, 20 bp, Artificial Sequence
  Description of Artificial Sequence: Synthetic oligonucleotide
  Target: COL7A1; (-) strand; PAM type: YTN; PAM sequence: TTC
gacttggatgacgttcaggc

SEQ ID NO: 27678 - DNA, 20 bp, Artificial Sequence
  Description of Artificial Sequence: Synthetic oligonucleotide
  Target: COL7A1; (-) strand; PAM type: YTN; PAM sequence: CTG
ggagtcagacagcattcgac

SEQ ID NO: 27679 - DNA, 20 bp, Artificial Sequence
  Description of Artificial Sequence: Synthetic oligonucleotide
  Target: COL7A1; (-) strand; PAM type: YTN; PAM sequence: TTC
ctgggagtcagacagcattc

SEQ ID NO: 27680 - DNA, 20 bp, Artificial Sequence
  Description of Artificial Sequence: Synthetic oligonucleotide
  Target: COL7A1; (-) strand; PAM type: YTN; PAM sequence: CTT
cctgggagtcagacagcatt

SEQ ID NO: 27681 - DNA, 20 bp, Artificial Sequence
  Description of Artificial Sequence: Synthetic oligonucleotide
  Target: COL7A1; (-) strand; PAM type: YTN; PAM sequence: CTG
gtgcttcctgggagtcagac

SEQ ID NO: 27682 - DNA, 20 bp, Artificial Sequence
  Description of Artificial Sequence: Synthetic oligonucleotide
  Target: COL7A1; (-) strand; PAM type: YTN; PAM sequence: TTG
agcggaccctggtgcttcct

SEQ ID NO: 27683 - DNA, 20 bp, Artificial Sequence
  Description of Artificial Sequence: Synthetic oligonucleotide
  Target: COL7A1; (-) strand; PAM type: YTN; PAM sequence: TTA
ggggttgagcggaccctggt

SEQ ID NO: 27684 - DNA, 20 bp, Artificial Sequence
  Description of Artificial Sequence: Synthetic oligonucleotide
  Target: COL7A1; (-) strand; PAM type: YTN; PAM sequence: CTT
aggggttgagcggaccctgg

SEQ ID NO: 27685 - DNA, 20 bp, Artificial Sequence
  Description of Artificial Sequence: Synthetic oligonucleotide
  Target: COL7A1; (-) strand; PAM type: YTN; PAM sequence: CTC
ttaggggttgagcggaccct

SEQ ID NO: 27686 - DNA, 20 bp, Artificial Sequence
  Description of Artificial Sequence: Synthetic oligonucleotide
  Target: COL7A1; (-) strand; PAM type: YTN; PAM sequence: CTC
tcttaggggttgagcggacc

SEQ ID NO: 27687 - DNA, 20 bp, Artificial Sequence
  Description of Artificial Sequence: Synthetic oligonucleotide
  Target: COL7A1; (-) strand; PAM type: YTN; PAM sequence: TTC
tctcttaggggttgagcgga

SEQ ID NO: 27688 - DNA, 20 bp, Artificial Sequence
  Description of Artificial Sequence: Synthetic oligonucleotide
  Target: COL7A1; (-) strand; PAM type: YTN; PAM sequence: CTT
ctctcttaggggttgagcgg

SEQ ID NO: 27689 - DNA, 20 bp, Artificial Sequence
  Description of Artificial Sequence: Synthetic oligonucleotide
  Target: COL7A1; (-) strand; PAM type: YTN; PAM sequence: CTG
acttctctcttaggggttga

SEQ ID NO: 27690 - DNA, 20 bp, Artificial Sequence
  Description of Artificial Sequence: Synthetic oligonucleotide
  Target: COL7A1; (-) strand; PAM type: YTN; PAM sequence: CTA
ccctgacttctctcttaggg

SEQ ID NO: 27691 - DNA, 20 bp, Artificial Sequence
  Description of Artificial Sequence: Synthetic oligonucleotide
  Target: COL7A1; (-) strand; PAM type: YTN; PAM sequence: CTG
cccacctaccctgacttctc

SEQ ID NO: 27692 - DNA, 20 bp, Artificial Sequence
  Description of Artificial Sequence: Synthetic oligonucleotide
  Target: COL7A1; (-) strand; PAM type: YTN; PAM sequence: CTG
acccctgcccacctaccctg

SEQ ID NO: 27693 - DNA, 20 bp, Artificial Sequence
  Description of Artificial Sequence: Synthetic oligonucleotide
  Target: COL7A1; (-) strand; PAM type: YTN; PAM sequence: TTC
tgacccctgcccacctaccc

SEQ ID NO: 27694 - DNA, 20 bp, Artificial Sequence
  Description of Artificial Sequence: Synthetic oligonucleotide
  Target: COL7A1; (-) strand; PAM type: YTN; PAM sequence: TTT
ctgacccctgcccacctacc

SEQ ID NO: 27695 - DNA, 20 bp, Artificial Sequence
  Description of Artificial Sequence: Synthetic oligonucleotide
  Target: COL7A1; (-) strand; PAM type: YTN; PAM sequence: CTT
tctgacccctgcccacctac

SEQ ID NO: 27696 - DNA, 20 bp, Artificial Sequence
  Description of Artificial Sequence: Synthetic oligonucleotide
  Target: COL7A1; (-) strand; PAM type: YTN; PAM sequence: CTC
tttctgacccctgcccacct

SEQ ID NO: 27697 - DNA, 20 bp, Artificial Sequence
  Description of Artificial Sequence: Synthetic oligonucleotide
  Target: COL7A1; (-) strand; PAM type: YTN; PAM sequence: CTG
tctctttctgacccctgccc

SEQ ID NO: 27698 - DNA, 20 bp, Artificial Sequence
  Description of Artificial Sequence: Synthetic oligonucleotide
  Target: COL7A1; (-) strand; PAM type: YTN; PAM sequence: CTG
ccatcgtcccacatccctgt

SEQ ID NO: 27699 - DNA, 20 bp, Artificial Sequence
  Description of Artificial Sequence: Synthetic oligonucleotide
  Target: COL7A1; (-) strand; PAM type: YTN; PAM sequence: CTG
tccatcactgccatcgtccc

SEQ ID NO: 27700 - DNA, 20 bp, Artificial Sequence
  Description of Artificial Sequence: Synthetic oligonucleotide
  Target: COL7A1; (-) strand; PAM type: YTN; PAM sequence: CTG
cgtccctgtccatcactgcc

SEQ ID NO: 27701 - DNA, 20 bp, Artificial Sequence
  Description of Artificial Sequence: Synthetic oligonucleotide
  Target: COL7A1; (-) strand; PAM type: YTN; PAM sequence: CTC
tgcgtccctgtccatcactg

SEQ ID NO: 27702 - DNA, 20 bp, Artificial Sequence
  Description of Artificial Sequence: Synthetic oligonucleotide
  Target: COL7A1; (-) strand; PAM type: YTN; PAM sequence: CTC
actctgcgtccctgtccatc

SEQ ID NO: 27703 - DNA, 20 bp, Artificial Sequence
  Description of Artificial Sequence: Synthetic oligonucleotide
  Target: COL7A1; (-) strand; PAM type: YTN; PAM sequence: TTC
tcactctgcgtccctgtcca

SEQ ID NO: 27704 - DNA, 20 bp, Artificial Sequence
  Description of Artificial Sequence: Synthetic oligonucleotide
  Target: COL7A1; (-) strand; PAM type: YTN; PAM sequence: CTT
ctcactctgcgtccctgtcc

SEQ ID NO: 27705 - DNA, 20 bp, Artificial Sequence
  Description of Artificial Sequence: Synthetic oligonucleotide
  Target: COL7A1; (-) strand; PAM type: YTN; PAM sequence: CTG
gtccccaccaccccacatcc

SEQ ID NO: 27706 - DNA, 20 bp, Artificial Sequence
  Description of Artificial Sequence: Synthetic oligonucleotide
  Target: COL7A1; (-) strand; PAM type: YTN; PAM sequence: CTC
tggtccccaccaccccacat

SEQ ID NO: 27707 - DNA, 20 bp, Artificial Sequence
  Description of Artificial Sequence: Synthetic oligonucleotide
  Target: COL7A1; (-) strand; PAM type: YTN; PAM sequence: CTC
tctggtccccaccaccccac

SEQ ID NO: 27708 - DNA, 20 bp, Artificial Sequence
  Description of Artificial Sequence: Synthetic oligonucleotide
  Target: COL7A1; (-) strand; PAM type: YTN; PAM sequence: TTC
agccatatcccagctctctg

SEQ ID NO: 27709 - DNA, 20 bp, Artificial Sequence
  Description of Artificial Sequence: Synthetic oligonucleotide
  Target: COL7A1; (-) strand; PAM type: YTN; PAM sequence: TTT
cagccatatcccagctctct

SEQ ID NO: 27710 - DNA, 20 bp, Artificial Sequence
  Description of Artificial Sequence: Synthetic oligonucleotide
  Target: COL7A1; (-) strand; PAM type: YTN; PAM sequence: TTT
tcagccatatcccagctctc

SEQ ID NO: 27711 - DNA, 20 bp, Artificial Sequence
  Description of Artificial Sequence: Synthetic oligonucleotide
  Target: COL7A1; (-) strand; PAM type: YTN; PAM sequence: TTT
ttcagccatatcccagctct

SEQ ID NO: 27712 - DNA, 20 bp, Artificial Sequence
  Description of Artificial Sequence: Synthetic oligonucleotide
  Target: COL7A1; (-) strand; PAM type: YTN; PAM sequence: TTT
tttcagccatatcccagctc

SEQ ID NO: 27713 - DNA, 20 bp, Artificial Sequence
  Description of Artificial Sequence: Synthetic oligonucleotide
  Target: COL7A1; (-) strand; PAM type: YTN; PAM sequence: CTT
ttttcagccatatcccagct

SEQ ID NO: 27714 - DNA, 20 bp, Artificial Sequence
  Description of Artificial Sequence: Synthetic oligonucleotide
  Target: COL7A1; (-) strand; PAM type: YTN; PAM sequence: CTC
acttttttcagccatatccc

SEQ ID NO: 27715 - DNA, 20 bp, Artificial Sequence
  Description of Artificial Sequence: Synthetic oligonucleotide
  Target: COL7A1; (-) strand; PAM type: YTN; PAM sequence: TTG
cactcacttttttcagccat

SEQ ID NO: 27716 - DNA, 20 bp, Artificial Sequence
  Description of Artificial Sequence: Synthetic oligonucleotide
  Target: COL7A1; (-) strand; PAM type: YTN; PAM sequence: CTT
gcactcacttttttcagcca

SEQ ID NO: 27717 - DNA, 20 bp, Artificial Sequence
  Description of Artificial Sequence: Synthetic oligonucleotide
  Target: COL7A1; (-) strand; PAM type: YTN; PAM sequence: TTG
tcttgcactcacttttttca

SEQ ID NO: 27718 - DNA, 20 bp, Artificial Sequence
  Description of Artificial Sequence: Synthetic oligonucleotide
  Target: COL7A1; (-) strand; PAM type: YTN; PAM sequence: CTT
gtcttgcactcacttttttc

SEQ ID NO: 27719 - DNA, 20 bp, Artificial Sequence
  Description of Artificial Sequence: Synthetic oligonucleotide
  Target: COL7A1; (-) strand; PAM type: YTN; PAM sequence: CTA
tgtccttgtcttgcactcac

SEQ ID NO: 27720 - DNA, 20 bp, Artificial Sequence
  Description of Artificial Sequence: Synthetic oligonucleotide
  Target: COL7A1; (-) strand; PAM type: YTN; PAM sequence: TTC
atcctatgtccttgtcttgc

SEQ ID NO: 27721 - DNA, 20 bp, Artificial Sequence
  Description of Artificial Sequence: Synthetic oligonucleotide
  Target: COL7A1; (-) strand; PAM type: YTN; PAM sequence: TTT
catcctatgtccttgtcttg

SEQ ID NO: 27722 - DNA, 20 bp, Artificial Sequence
  Description of Artificial Sequence: Synthetic oligonucleotide
  Target: COL7A1; (-) strand; PAM type: YTN; PAM sequence: CTT
tcatcctatgtccttgtctt

SEQ ID NO: 27723 - DNA, 20 bp, Artificial Sequence
  Description of Artificial Sequence: Synthetic oligonucleotide
  Target: COL7A1; (-) strand; PAM type: YTN; PAM sequence: CTG
gcccctttcatcctatgtcc

SEQ ID NO: 27724 - DNA, 20 bp, Artificial Sequence
  Description of Artificial Sequence: Synthetic oligonucleotide
  Target: COL7A1; (-) strand; PAM type: YTN; PAM sequence: CTG
accatcactggcccctttca

SEQ ID NO: 27725 - DNA, 20 bp, Artificial Sequence
  Description of Artificial Sequence: Synthetic oligonucleotide
  Target: COL7A1; (-) strand; PAM type: YTN; PAM sequence: CTC
cagtgtccctgaccatcact

SEQ ID NO: 27726 - DNA, 20 bp, Artificial Sequence
  Description of Artificial Sequence: Synthetic oligonucleotide
  Target: COL7A1; (-) strand; PAM type: YTN; PAM sequence: CTG
tcctccagtgtccctgacca

SEQ ID NO: 27727 - DNA, 20 bp, Artificial Sequence
  Description of Artificial Sequence: Synthetic oligonucleotide
  Target: COL7A1; (-) strand; PAM type: YTN; PAM sequence: CTC
ctgtcctccagtgtccctga

SEQ ID NO: 27728 - DNA, 20 bp, Artificial Sequence
  Description of Artificial Sequence: Synthetic oligonucleotide
  Target: COL7A1; (-) strand; PAM type: YTN; PAM sequence: CTA
agatcccacagactcctgtc

SEQ ID NO: 27729 - DNA, 20 bp, Artificial Sequence
  Description of Artificial Sequence: Synthetic oligonucleotide
  Target: COL7A1; (-) strand; PAM type: YTN; PAM sequence: CTA
catgctaagatcccacagac

SEQ ID NO: 27730 - DNA, 20 bp, Artificial Sequence
  Description of Artificial Sequence: Synthetic oligonucleotide
  Target: COL7A1; (-) strand; PAM type: YTN; PAM sequence: CTG
tcatcctacatgctaagatc

SEQ ID NO: 27731 - DNA, 20 bp, Artificial Sequence
  Description of Artificial Sequence: Synthetic oligonucleotide
  Target: COL7A1; (-) strand; PAM type: YTN; PAM sequence: CTC
ctgtcatcctacatgctaag

SEQ ID NO: 27732 - DNA, 20 bp, Artificial Sequence
  Description of Artificial Sequence: Synthetic oligonucleotide
  Target: COL7A1; (-) strand; PAM type: YTN; PAM sequence: CTG
actcctgtcatcctacatgc

SEQ ID NO: 27733 - DNA, 20 bp, Artificial Sequence
  Description of Artificial Sequence: Synthetic oligonucleotide
  Target: COL7A1; (-) strand; PAM type: YTN; PAM sequence: CTG
cagtccactgactcctgtca

SEQ ID NO: 27734 - DNA, 20 bp, Artificial Sequence
  Description of Artificial Sequence: Synthetic oligonucleotide
  Target: COL7A1; (-) strand; PAM type: YTN; PAM sequence: CTC
actgcagtccactgactcct

SEQ ID NO: 27735 - DNA, 20 bp, Artificial Sequence
  Description of Artificial Sequence: Synthetic oligonucleotide
  Target: COL7A1; (-) strand; PAM type: YTN; PAM sequence: TTC
tcactgcagtccactgactc

SEQ ID NO: 27736 - DNA, 20 bp, Artificial Sequence
  Description of Artificial Sequence: Synthetic oligonucleotide
  Target: COL7A1; (-) strand; PAM type: YTN; PAM sequence: CTC
atcagttctcactgcagtcc

SEQ ID NO: 27737 - DNA, 20 bp, Artificial Sequence
  Description of Artificial Sequence: Synthetic oligonucleotide
  Target: COL7A1; (-) strand; PAM type: YTN; PAM sequence: CTG
tcaatggctcatcagttctc

SEQ ID NO: 27738 - DNA, 20 bp, Artificial Sequence
  Description of Artificial Sequence: Synthetic oligonucleotide
  Target: COL7A1; (-) strand; PAM type: YTN; PAM sequence: CTG
ccatcccacatcagtgtctg

SEQ ID NO: 27739 - DNA, 20 bp, Artificial Sequence
  Description of Artificial Sequence: Synthetic oligonucleotide
  Target: COL7A1; (-) strand; PAM type: YTN; PAM sequence: CTC
tgccatcccacatcagtgtc

SEQ ID NO: 27740 - DNA, 20 bp, Artificial Sequence
  Description of Artificial Sequence: Synthetic oligonucleotide
  Target: COL7A1; (-) strand; PAM type: YTN; PAM sequence: CTG
acctctgccatcccacatca

SEQ ID NO: 27741 - DNA, 20 bp, Artificial Sequence
  Description of Artificial Sequence: Synthetic oligonucleotide
  Target: COL7A1; (-) strand; PAM type: YTN; PAM sequence: TTG
catgtccccatccagcactg

SEQ ID NO: 27742 - DNA, 20 bp, Artificial Sequence
  Description of Artificial Sequence: Synthetic oligonucleotide
  Target: COL7A1; (-) strand; PAM type: YTN; PAM sequence: CTC
attgcatgtccccatccagc

SEQ ID NO: 27743 - DNA, 20 bp, Artificial Sequence
  Description of Artificial Sequence: Synthetic oligonucleotide
  Target: COL7A1; (-) strand; PAM type: YTN; PAM sequence: CTC
tcattgcatgtccccatcca

SEQ ID NO: 27744 - DNA, 20 bp, Artificial Sequence
  Description of Artificial Sequence: Synthetic oligonucleotide
  Target: COL7A1; (-) strand; PAM type: YTN; PAM sequence: CTG
tacaccaacctctcattgca

SEQ ID NO: 27745 - DNA, 20 bp, Artificial Sequence
  Description of Artificial Sequence: Synthetic oligonucleotide
  Target: COL7A1; (-) strand; PAM type: YTN; PAM sequence: CTA
gtggtgaccactgtacacca

SEQ ID NO: 27746 - DNA, 20 bp, Artificial Sequence
  Description of Artificial Sequence: Synthetic oligonucleotide
  Target: COL7A1; (-) strand; PAM type: YTN; PAM sequence: TTA
ccctagtggtgaccactgta

SEQ ID NO: 27747 - DNA, 20 bp, Artificial Sequence
  Description of Artificial Sequence: Synthetic oligonucleotide
  Target: COL7A1; (-) strand; PAM type: YTN; PAM sequence: CTG
ttaccctagtggtgaccact

SEQ ID NO: 27748 - DNA, 20 bp, Artificial Sequence
  Description of Artificial Sequence: Synthetic oligonucleotide
  Target: COL7A1; (-) strand; PAM type: YTN; PAM sequence: TTC
tgttaccctagtggtgacca

SEQ ID NO: 27749 - DNA, 20 bp, Artificial Sequence
  Description of Artificial Sequence: Synthetic oligonucleotide
  Target: COL7A1; (-) strand; PAM type: YTN; PAM sequence: TTT
ctgttaccctagtggtgacc

SEQ ID NO: 27750 - DNA, 20 bp, Artificial Sequence
  Description of Artificial Sequence: Synthetic oligonucleotide
  Target: COL7A1; (-) strand; PAM type: YTN; PAM sequence: CTT
tctgttaccctagtggtgac

SEQ ID NO: 27751 - DNA, 20 bp, Artificial Sequence
  Description of Artificial Sequence: Synthetic oligonucleotide
  Target: COL7A1; (-) strand; PAM type: YTN; PAM sequence: CTG
tctttctgttaccctagtgg

SEQ ID NO: 27752 - DNA, 20 bp, Artificial Sequence
  Description of Artificial Sequence: Synthetic oligonucleotide
  Target: COL7A1; (-) strand; PAM type: YTN; PAM sequence: CTC
aatcacctgtctttctgtta

SEQ ID NO: 27753 - DNA, 20 bp, Artificial Sequence
  Description of Artificial Sequence: Synthetic oligonucleotide
  Target: COL7A1; (-) strand; PAM type: YTN; PAM sequence: CTG
cacagccacaagctcaatca

SEQ ID NO: 27754 - DNA, 20 bp, Artificial Sequence
  Description of Artificial Sequence: Synthetic oligonucleotide
  Target: COL7A1; (-) strand; PAM type: YTN; PAM sequence: CTC
tgcacagccacaagctcaat

SEQ ID NO: 27755 - DNA, 20 bp, Artificial Sequence
  Description of Artificial Sequence: Synthetic oligonucleotide
  Target: COL7A1; (-) strand; PAM type: YTN; PAM sequence: TTC
acctctgcacagccacaagc

SEQ ID NO: 27756 - DNA, 20 bp, Artificial Sequence
  Description of Artificial Sequence: Synthetic oligonucleotide
  Target: COL7A1; (-) strand; PAM type: YTN; PAM sequence: TTT
cacctctgcacagccacaag

SEQ ID NO: 27757 - DNA, 20 bp, Artificial Sequence
  Description of Artificial Sequence: Synthetic oligonucleotide
  Target: COL7A1; (-) strand; PAM type: YTN; PAM sequence: CTT
tcacctctgcacagccacaa

SEQ ID NO: 27758 - DNA, 20 bp, Artificial Sequence
  Description of Artificial Sequence: Synthetic oligonucleotide
  Target: COL7A1; (-) strand; PAM type: YTN; PAM sequence: CTG
ccccacaccccatccacggc

SEQ ID NO: 27759 - DNA, 20 bp, Artificial Sequence
  Description of Artificial Sequence: Synthetic oligonucleotide
  Target: COL7A1; (-) strand; PAM type: YTN; PAM sequence: CTC
cctgccccacaccccatcca

SEQ ID NO: 27760 - DNA, 20 bp, Artificial Sequence
  Description of Artificial Sequence: Synthetic oligonucleotide
  Target: COL7A1; (-) strand; PAM type: YTN; PAM sequence: CTC
ctccctgccccacaccccat

SEQ ID NO: 27761 - DNA, 20 bp, Artificial Sequence
  Description of Artificial Sequence: Synthetic oligonucleotide
  Target: COL7A1; (-) strand; PAM type: YTN; PAM sequence: CTA
ccccaaccaatctcctccct

SEQ ID NO: 27762 - DNA, 20 bp, Artificial Sequence
  Description of Artificial Sequence: Synthetic oligonucleotide
  Target: COL7A1; (-) strand; PAM type: YTN; PAM sequence: CTA
ccctaccccaaccaatctcc

SEQ ID NO: 27763 - DNA, 20 bp, Artificial Sequence
  Description of Artificial Sequence: Synthetic oligonucleotide
  Target: COL7A1; (-) strand; PAM type: YTN; PAM sequence: CTG
cccctaccctaccccaacca

SEQ ID NO: 27764 - DNA, 20 bp, Artificial Sequence
  Description of Artificial Sequence: Synthetic oligonucleotide
  Target: COL7A1; (-) strand; PAM type: YTN; PAM sequence: CTG
tcaacagggtgtgtctgccc

SEQ ID NO: 27765 - DNA, 20 bp, Artificial Sequence
  Description of Artificial Sequence: Synthetic oligonucleotide
  Target: COL7A1; (-) strand; PAM type: YTN; PAM sequence: CTG
aactgtcaacagggtgtgtc

SEQ ID NO: 27766 - DNA, 20 bp, Artificial Sequence
  Description of Artificial Sequence: Synthetic oligonucleotide
  Target: COL7A1; (-) strand; PAM type: YTN; PAM sequence: CTG
agccctgaactgtcaacagg

SEQ ID NO: 27767 - DNA, 20 bp, Artificial Sequence
  Description of Artificial Sequence: Synthetic oligonucleotide
  Target: COL7A1; (-) strand; PAM type: YTN; PAM sequence: TTC
ccaagatggcactgagccct

SEQ ID NO: 27768 - DNA, 20 bp, Artificial Sequence
  Description of Artificial Sequence: Synthetic oligonucleotide
  Target: COL7A1; (-) strand; PAM type: YTN; PAM sequence: CTT
cccaagatggcactgagccc

SEQ ID NO: 27769 - DNA, 20 bp, Artificial Sequence
  Description of Artificial Sequence: Synthetic oligonucleotide
  Target: COL7A1; (-) strand; PAM type: YTN; PAM sequence: CTG
cttcccaagatggcactgag

SEQ ID NO: 27770 - DNA, 20 bp, Artificial Sequence
  Description of Artificial Sequence: Synthetic oligonucleotide
  Target: COL7A1; (-) strand; PAM type: YTN; PAM sequence: TTA
tccatctgcttcccaagatg

SEQ ID NO: 27771 - DNA, 20 bp, Artificial Sequence
  Description of Artificial Sequence: Synthetic oligonucleotide
  Target: COL7A1; (-) strand; PAM type: YTN; PAM sequence: CTC
gttatccatctgcttcccaa

SEQ ID NO: 27772 - DNA, 20 bp, Artificial Sequence
  Description of Artificial Sequence: Synthetic oligonucleotide
  Target: COL7A1; (-) strand; PAM type: YTN; PAM sequence: CTG
tctcgttatccatctgcttc

SEQ ID NO: 27773 - DNA, 20 bp, Artificial Sequence
  Description of Artificial Sequence: Synthetic oligonucleotide
  Target: COL7A1; (-) strand; PAM type: YTN; PAM sequence: CTC
cctgtctcgttatccatctg

SEQ ID NO: 27774 - DNA, 20 bp, Artificial Sequence
  Description of Artificial Sequence: Synthetic oligonucleotide
  Target: COL7A1; (-) strand; PAM type: YTN; PAM sequence: CTC
ctccctgtctcgttatccat

SEQ ID NO: 27775 - DNA, 20 bp, Artificial Sequence
  Description of Artificial Sequence: Synthetic oligonucleotide
  Target: COL7A1; (-) strand; PAM type: YTN; PAM sequence: CTA
tagtctcctccctgtctcgt

SEQ ID NO: 27776 - DNA, 20 bp, Artificial Sequence
  Description of Artificial Sequence: Synthetic oligonucleotide
  Target: COL7A1; (-) strand; PAM type: YTN; PAM sequence: CTG
ggtccctatagtctcctccc

SEQ ID NO: 27777 - DNA, 20 bp, Artificial Sequence
  Description of Artificial Sequence: Synthetic oligonucleotide
  Target: COL7A1; (-) strand; PAM type: YTN; PAM sequence: TTC
cacacctgggtccctatagt

SEQ ID NO: 27778 - DNA, 20 bp, Artificial Sequence
  Description of Artificial Sequence: Synthetic oligonucleotide
  Target: COL7A1; (-) strand; PAM type: YTN; PAM sequence: CTT
ccacacctgggtccctatag

SEQ ID NO: 27779 - DNA, 20 bp, Artificial Sequence
  Description of Artificial Sequence: Synthetic oligonucleotide
  Target: COL7A1; (-) strand; PAM type: YTN; PAM sequence: CTC
cttccacacctgggtcccta

SEQ ID NO: 27780 - DNA, 20 bp, Artificial Sequence
  Description of Artificial Sequence: Synthetic oligonucleotide
  Target: COL7A1; (-) strand; PAM type: YTN; PAM sequence: CTC
tccttccacacctgggtccc

SEQ ID NO: 27781 - DNA, 20 bp, Artificial Sequence
  Description of Artificial Sequence: Synthetic oligonucleotide
  Target: COL7A1; (-) strand; PAM type: YTN; PAM sequence: CTC
cagccctctccttccacacc

SEQ ID NO: 27782 - DNA, 20 bp, Artificial Sequence
  Description of Artificial Sequence: Synthetic oligonucleotide
  Target: COL7A1; (-) strand; PAM type: YTN; PAM sequence: CTG
agtgtacctccagccctctc

SEQ ID NO: 27783 - DNA, 20 bp, Artificial Sequence
  Description of Artificial Sequence: Synthetic oligonucleotide
  Target: COL7A1; (-) strand; PAM type: YTN; PAM sequence: CTG
aggggtctgagtgtacctcc

SEQ ID NO: 27784 - DNA, 20 bp, Artificial Sequence
  Description of Artificial Sequence: Synthetic oligonucleotide
  Target: COL7A1; (-) strand; PAM type: YTN; PAM sequence: TTC
cagcctgaggggtctgagtg

SEQ ID NO: 27785 - DNA, 20 bp, Artificial Sequence
  Description of Artificial Sequence: Synthetic oligonucleotide
  Target: COL7A1; (-) strand; PAM type: YTN; PAM sequence: CTG
aagttccagcctgaggggtc

SEQ ID NO: 27786 - DNA, 20 bp, Artificial Sequence
  Description of Artificial Sequence: Synthetic oligonucleotide
  Target: COL7A1; (-) strand; PAM type: YTN; PAM sequence: TTG
tgcgcagcacccagggtgag

SEQ ID NO: 27787 - DNA, 20 bp, Artificial Sequence
  Description of Artificial Sequence: Synthetic oligonucleotide
  Target: COL7A1; (-) strand; PAM type: YTN; PAM sequence: CTG
gtgccacccagtaccgcatc

SEQ ID NO: 27788 - DNA, 20 bp, Artificial Sequence
  Description of Artificial Sequence: Synthetic oligonucleotide
  Target: COL7A1; (-) strand; PAM type: YTN; PAM sequence: CTG
gagcccagtccctggtgcca

SEQ ID NO: 27789 - DNA, 20 bp, Artificial Sequence
  Description of Artificial Sequence: Synthetic oligonucleotide
  Target: COL7A1; (-) strand; PAM type: YTN; PAM sequence: CTG
cccgggcagcgggtgcgagt

SEQ ID NO: 27790 - DNA, 20 bp, Artificial Sequence
  Description of Artificial Sequence: Synthetic oligonucleotide
  Target: COL7A1; (-) strand; PAM type: YTN; PAM sequence: CTG
caagccaccgagctgcccgg

SEQ ID NO: 27791 - DNA, 20 bp, Artificial Sequence
  Description of Artificial Sequence: Synthetic oligonucleotide
  Target: COL7A1; (-) strand; PAM type: YTN; PAM sequence: CTG
taacagacctgcaagccacc

SEQ ID NO: 27792 - DNA, 20 bp, Artificial Sequence
  Description of Artificial Sequence: Synthetic oligonucleotide
  Target: COL7A1; (-) strand; PAM type: YTN; PAM sequence: CTG
tgagccctgtaacagacctg

SEQ ID NO: 27793 - DNA, 20 bp, Artificial Sequence
  Description of Artificial Sequence: Synthetic oligonucleotide
  Target: COL7A1; (-) strand; PAM type: YTN; PAM sequence: CTG
cctgtgagccctgtaacaga

SEQ ID NO: 27794 - DNA, 20 bp, Artificial Sequence
  Description of Artificial Sequence: Synthetic oligonucleotide
  Target: COL7A1; (-) strand; PAM type: YTN; PAM sequence: CTC
caacaggaccagagctgcct

SEQ ID NO: 27795 - DNA, 20 bp, Artificial Sequence
  Description of Artificial Sequence: Synthetic oligonucleotide
  Target: COL7A1; (-) strand; PAM type: YTN; PAM sequence: CTC
tccaacaggaccagagctgc

SEQ ID NO: 27796 - DNA, 20 bp, Artificial Sequence
  Description of Artificial Sequence: Synthetic oligonucleotide
  Target: COL7A1; (-) strand; PAM type: YTN; PAM sequence: CTG
tgctctccaacaggaccaga

SEQ ID NO: 27797 - DNA, 20 bp, Artificial Sequence
  Description of Artificial Sequence: Synthetic oligonucleotide
  Target: COL7A1; (-) strand; PAM type: YTN; PAM sequence: CTA
tgctgtgctctccaacagga

SEQ ID NO: 27798 - DNA, 20 bp, Artificial Sequence
  Description of Artificial Sequence: Synthetic oligonucleotide
  Target: COL7A1; (-) strand; PAM type: YTN; PAM sequence: CTC
tatgctgtgctctccaacag

SEQ ID NO: 27799 - DNA, 20 bp, Artificial Sequence
  Description of Artificial Sequence: Synthetic oligonucleotide
  Target: COL7A1; (-) strand; PAM type: YTN; PAM sequence: CTG
cctctatgctgtgctctcca

SEQ ID NO: 27800 - DNA, 20 bp, Artificial Sequence
  Description of Artificial Sequence: Synthetic oligonucleotide
  Target: COL7A1; (-) strand; PAM type: YTN; PAM sequence: CTG
ggccagtgagtgggggaggt

SEQ ID NO: 27801 - DNA, 20 bp, Artificial Sequence
  Description of Artificial Sequence: Synthetic oligonucleotide
  Target: COL7A1; (-) strand; PAM type: YTN; PAM sequence: CTG
tgggctgggccagtgagtgg

SEQ ID NO: 27802 - DNA, 20 bp, Artificial Sequence
  Description of Artificial Sequence: Synthetic oligonucleotide
  Target: COL7A1; (-) strand; PAM type: YTN; PAM sequence: CTC
tgtgggctgggccagtgagt

SEQ ID NO: 27803 - DNA, 20 bp, Artificial Sequence
  Description of Artificial Sequence: Synthetic oligonucleotide
  Target: COL7A1; (-) strand; PAM type: YTN; PAM sequence: CTG
gtgagggctctgtgggctgg

SEQ ID NO: 27804 - DNA, 20 bp, Artificial Sequence
  Description of Artificial Sequence: Synthetic oligonucleotide
  Target: COL7A1; (-) strand; PAM type: YTN; PAM sequence: TTC
ccactggtgagggctctgtg

SEQ ID NO: 27805 - DNA, 20 bp, Artificial Sequence
  Description of Artificial Sequence: Synthetic oligonucleotide
  Target: COL7A1; (-) strand; PAM type: YTN; PAM sequence: CTG
caaccgtggttcccactggt

SEQ ID NO: 27806 - DNA, 20 bp, Artificial Sequence
  Description of Artificial Sequence: Synthetic oligonucleotide
  Target: COL7A1; (-) strand; PAM type: YTN; PAM sequence: CTG
gagggccacgaggtggccac

SEQ ID NO: 27807 - DNA, 20 bp, Artificial Sequence
  Description of Artificial Sequence: Synthetic oligonucleotide
  Target: COL7A1; (-) strand; PAM type: YTN; PAM sequence: CTG
ctggagggccacgaggtggc

SEQ ID NO: 27808 - DNA, 20 bp, Artificial Sequence
  Description of Artificial Sequence: Synthetic oligonucleotide
  Target: COL7A1; (-) strand; PAM type: YTN; PAM sequence: CTC
tgctggagggccacgaggtg

SEQ ID NO: 27809 - DNA, 20 bp, Artificial Sequence
  Description of Artificial Sequence: Synthetic oligonucleotide
  Target: COL7A1; (-) strand; PAM type: YTN; PAM sequence: CTA
cactctgctggagggccacg

SEQ ID NO: 27810 - DNA, 20 bp, Artificial Sequence
  Description of Artificial Sequence: Synthetic oligonucleotide
  Target: COL7A1; (-) strand; PAM type: YTN; PAM sequence: CTC
tacactctgctggagggcca

SEQ ID NO: 27811 - DNA, 20 bp, Artificial Sequence
  Description of Artificial Sequence: Synthetic oligonucleotide
  Target: COL7A1; (-) strand; PAM type: YTN; PAM sequence: CTC
acactctacactctgctgga

SEQ ID NO: 27812 - DNA, 20 bp, Artificial Sequence
  Description of Artificial Sequence: Synthetic oligonucleotide
  Target: COL7A1; (-) strand; PAM type: YTN; PAM sequence: CTG
agtaccgcctcacactctac

SEQ ID NO: 27813 - DNA, 20 bp, Artificial Sequence
  Description of Artificial Sequence: Synthetic oligonucleotide
  Target: COL7A1; (-) strand; PAM type: YTN; PAM sequence: CTG
cagccgggcactgagtaccg

SEQ ID NO: 27814 - DNA, 20 bp, Artificial Sequence
  Description of Artificial Sequence: Synthetic oligonucleotide
  Target: COL7A1; (-) strand; PAM type: YTN; PAM sequence: TTG
gatgggctgcagccgggcac

SEQ ID NO: 27815 - DNA, 20 bp, Artificial Sequence
  Description of Artificial Sequence: Synthetic oligonucleotide
  Target: COL7A1; (-) strand; PAM type: YTN; PAM sequence: CTA
ccagttggatgggctgcagc

SEQ ID NO: 27816 - DNA, 20 bp, Artificial Sequence
  Description of Artificial Sequence: Synthetic oligonucleotide
  Target: COL7A1; (-) strand; PAM type: YTN; PAM sequence: CTG
atgtgacccgctaccagttg

SEQ ID NO: 27817 - DNA, 20 bp, Artificial Sequence
  Description of Artificial Sequence: Synthetic oligonucleotide
  Target: COL7A1; (-) strand; PAM type: YTN; PAM sequence: CTC
tgatgtgacccgctaccagt

SEQ ID NO: 27818 - DNA, 20 bp, Artificial Sequence
  Description of Artificial Sequence: Synthetic oligonucleotide
  Target: COL7A1; (-) strand; PAM type: YTN; PAM sequence: CTG
ccctctgatgtgacccgcta

SEQ ID NO: 27819 - DNA, 20 bp, Artificial Sequence
  Description of Artificial Sequence: Synthetic oligonucleotide
  Target: COL7A1; (-) strand; PAM type: YTN; PAM sequence: TTG
gagccaccgcagaaggtggt

SEQ ID NO: 27820 - DNA, 20 bp, Artificial Sequence
  Description of Artificial Sequence: Synthetic oligonucleotide
  Target: COL7A1; (-) strand; PAM type: YTN; PAM sequence: CTT
ggagccaccgcagaaggtgg

SEQ ID NO: 27821 - DNA, 20 bp, Artificial Sequence
  Description of Artificial Sequence: Synthetic oligonucleotide
  Target: COL7A1; (-) strand; PAM type: YTN; PAM sequence: TTG
caggcttggagccaccgcag

SEQ ID NO: 27822 - DNA, 20 bp, Artificial Sequence
  Description of Artificial Sequence: Synthetic oligonucleotide
  Target: COL7A1; (-) strand; PAM type: YTN; PAM sequence: CTT
gcaggcttggagccaccgca

SEQ ID NO: 27823 - DNA, 20 bp, Artificial Sequence
  Description of Artificial Sequence: Synthetic oligonucleotide
  Target: COL7A1; (-) strand; PAM type: YTN; PAM sequence: TTA
tcttgcaggcttggagccac

SEQ ID NO: 27824 - DNA, 20 bp, Artificial Sequence
  Description of Artificial Sequence: Synthetic oligonucleotide
  Target: COL7A1; (-) strand; PAM type: YTN; PAM sequence: CTG
ttatcttgcaggcttggagc

SEQ ID NO: 27825 - DNA, 20 bp, Artificial Sequence
  Description of Artificial Sequence: Synthetic oligonucleotide
  Target: COL7A1; (-) strand; PAM type: YTN; PAM sequence: CTG
accctgttatcttgcaggct

SEQ ID NO: 27826 - DNA, 20 bp, Artificial Sequence
  Description of Artificial Sequence: Synthetic oligonucleotide
  Target: COL7A1; (-) strand; PAM type: YTN; PAM sequence: CTG
gtctgaccctgttatcttgc

SEQ ID NO: 27827 - DNA, 20 bp, Artificial Sequence
  Description of Artificial Sequence: Synthetic oligonucleotide
  Target: COL7A1; (-) strand; PAM type: YTN; PAM sequence: CTG
ctggtctgaccctgttatct

SEQ ID NO: 27828 - DNA, 20 bp, Artificial Sequence
  Description of Artificial Sequence: Synthetic oligonucleotide
  Target: COL7A1; (-) strand; PAM type: YTN; PAM sequence: CTC
tgctggtctgaccctgttat

SEQ ID NO: 27829 - DNA, 20 bp, Artificial Sequence
  Description of Artificial Sequence: Synthetic oligonucleotide
  Target: COL7A1; (-) strand; PAM type: YTN; PAM sequence: CTG
gtcagtgcgggggaagggat

SEQ ID NO: 27830 - DNA, 20 bp, Artificial Sequence
  Description of Artificial Sequence: Synthetic oligonucleotide
  Target: COL7A1; (-) strand; PAM type: YTN; PAM sequence: TTG
gaatggcggcgtgagactgg

SEQ ID NO: 27831 - DNA, 20 bp, Artificial Sequence
  Description of Artificial Sequence: Synthetic oligonucleotide
  Target: COL7A1; (-) strand; PAM type: YTN; PAM sequence: CTA
ccggttggaatggcggcgtg

SEQ ID NO: 27832 - DNA, 20 bp, Artificial Sequence
  Description of Artificial Sequence: Synthetic oligonucleotide
  Target: COL7A1; (-) strand; PAM type: YTN; PAM sequence: CTG
aggcccgtggctaccggttg

SEQ ID NO: 27833 - DNA, 20 bp, Artificial Sequence
  Description of Artificial Sequence: Synthetic oligonucleotide
  Target: COL7A1; (-) strand; PAM type: YTN; PAM sequence: TTG
gtgcctgaggcccgtggcta

SEQ ID NO: 27834 - DNA, 20 bp, Artificial Sequence
  Description of Artificial Sequence: Synthetic oligonucleotide
  Target: COL7A1; (-) strand; PAM type: YTN; PAM sequence: CTT
ggtgcctgaggcccgtggct

SEQ ID NO: 27835 - DNA, 20 bp, Artificial Sequence
  Description of Artificial Sequence: Synthetic oligonucleotide
  Target: COL7A1; (-) strand; PAM type: YTN; PAM sequence: CTG
gaacttggtgcctgaggccc

SEQ ID NO: 27836 - DNA, 20 bp, Artificial Sequence
  Description of Artificial Sequence: Synthetic oligonucleotide
  Target: COL7A1; (-) strand; PAM type: YTN; PAM sequence: TTC
ctggaacttggtgcctgagg

SEQ ID NO: 27837 - DNA, 20 bp, Artificial Sequence
  Description of Artificial Sequence: Synthetic oligonucleotide
  Target: COL7A1; (-) strand; PAM type: YTN; PAM sequence: TTT
cctggaacttggtgcctgag

SEQ ID NO: 27838 - DNA, 20 bp, Artificial Sequence
  Description of Artificial Sequence: Synthetic oligonucleotide
  Target: COL7A1; (-) strand; PAM type: YTN; PAM sequence: CTT
tcctggaacttggtgcctga

SEQ ID NO: 27839 - DNA, 20 bp, Artificial Sequence
  Description of Artificial Sequence: Synthetic oligonucleotide
  Target: COL7A1; (-) strand; PAM type: YTN; PAM sequence: CTC
ctttcctggaacttggtgcc

SEQ ID NO: 27840 - DNA, 20 bp, Artificial Sequence
  Description of Artificial Sequence: Synthetic oligonucleotide
  Target: COL7A1; (-) strand; PAM type: YTN; PAM sequence: CTG
ggccccacatccatcctcct

SEQ ID NO: 27841 - DNA, 20 bp, Artificial Sequence
  Description of Artificial Sequence: Synthetic oligonucleotide
  Target: COL7A1; (-) strand; PAM type: YTN; PAM sequence: CTG
cgcccggtcatcctgggccc

SEQ ID NO: 27842 - DNA, 20 bp, Artificial Sequence
  Description of Artificial Sequence: Synthetic oligonucleotide
  Target: COL7A1; (-) strand; PAM type: YTN; PAM sequence: TTG
agcagaccctgcgcccggtc

SEQ ID NO: 27843 - DNA, 20 bp, Artificial Sequence
  Description of Artificial Sequence: Synthetic oligonucleotide
  Target: COL7A1; (-) strand; PAM type: YTN; PAM sequence: CTG
ttgagcagaccctgcgcccg

SEQ ID NO: 27844 - DNA, 20 bp, Artificial Sequence
  Description of Artificial Sequence: Synthetic oligonucleotide
  Target: COL7A1; (-) strand; PAM type: YTN; PAM sequence: TTC
tgttgagcagaccctgcgcc

SEQ ID NO: 27845 - DNA, 20 bp, Artificial Sequence
  Description of Artificial Sequence: Synthetic oligonucleotide
  Target: COL7A1; (-) strand; PAM type: YTN; PAM sequence: CTT
ctgttgagcagaccctgcgc

SEQ ID NO: 27846 - DNA, 20 bp, Artificial Sequence
  Description of Artificial Sequence: Synthetic oligonucleotide
  Target: COL7A1; (-) strand; PAM type: YTN; PAM sequence: CTG
ggcagacgcttctgttgagc

SEQ ID NO: 27847 - DNA, 20 bp, Artificial Sequence
  Description of Artificial Sequence: Synthetic oligonucleotide
  Target: COL7A1; (-) strand; PAM type: YTN; PAM sequence: CTG
acatcccatgtgccctgggc

SEQ ID NO: 27848 - DNA, 20 bp, Artificial Sequence
  Description of Artificial Sequence: Synthetic oligonucleotide
  Target: COL7A1; (-) strand; PAM type: YTN; PAM sequence: CTG
ggacgggcaggcagggcaag

SEQ ID NO: 27849 - DNA, 20 bp, Artificial Sequence
  Description of Artificial Sequence: Synthetic oligonucleotide
  Target: COL7A1; (-) strand; PAM type: YTN; PAM sequence: TTC
aggctgggacgggcaggcag

SEQ ID NO: 27850 - DNA, 20 bp, Artificial Sequence
  Description of Artificial Sequence: Synthetic oligonucleotide
  Target: COL7A1; (-) strand; PAM type: YTN; PAM sequence: CTT
caggctgggacgggcaggca

SEQ ID NO: 27851 - DNA, 20 bp, Artificial Sequence
  Description of Artificial Sequence: Synthetic oligonucleotide
  Target: COL7A1; (-) strand; PAM type: YTN; PAM sequence: TTC
ttcaggctgggacgggcagg

SEQ ID NO: 27852 - DNA, 20 bp, Artificial Sequence
  Description of Artificial Sequence: Synthetic oligonucleotide
  Target: COL7A1; (-) strand; PAM type: YTN; PAM sequence: TTT
cttcaggctgggacgggcag

SEQ ID NO: 27853 - DNA, 20 bp, Artificial Sequence
  Description of Artificial Sequence: Synthetic oligonucleotide
  Target: COL7A1; (-) strand; PAM type: YTN; PAM sequence: CTT
tcttcaggctgggacgggca

SEQ ID NO: 27854 - DNA, 20 bp, Artificial Sequence
  Description of Artificial Sequence: Synthetic oligonucleotide
  Target: COL7A1; (-) strand; PAM type: YTN; PAM sequence: CTG
ggcactttcttcaggctggg

SEQ ID NO: 27855 - DNA, 20 bp, Artificial Sequence
  Description of Artificial Sequence: Synthetic oligonucleotide
  Target: COL7A1; (-) strand; PAM type: YTN; PAM sequence: CTG
gtgagaaggctgggcacttt

SEQ ID NO: 27856 - DNA, 20 bp, Artificial Sequence
  Description of Artificial Sequence: Synthetic oligonucleotide
  Target: COL7A1; (-) strand; PAM type: YTN; PAM sequence: CTC
gcactggtgagaaggctggg

SEQ ID NO: 27857 - DNA, 20 bp, Artificial Sequence
  Description of Artificial Sequence: Synthetic oligonucleotide
  Target: COL7A1; (-) strand; PAM type: YTN; PAM sequence: CTG
atggctcgcactggtgagaa

SEQ ID NO: 27858 - DNA, 20 bp, Artificial Sequence
  Description of Artificial Sequence: Synthetic oligonucleotide
  Target: COL7A1; (-) strand; PAM type: YTN; PAM sequence: TTC
cctgatggctcgcactggtg

SEQ ID NO: 27859 - DNA, 20 bp, Artificial Sequence
  Description of Artificial Sequence: Synthetic oligonucleotide
  Target: COL7A1; (-) strand; PAM type: YTN; PAM sequence: CTT
ccctgatggctcgcactggt

SEQ ID NO: 27860 - DNA, 20 bp, Artificial Sequence
  Description of Artificial Sequence: Synthetic oligonucleotide
  Target: COL7A1; (-) strand; PAM type: YTN; PAM sequence: TTG
gccgcagtgtggggcccgcc

SEQ ID NO: 27861 - DNA, 20 bp, Artificial Sequence
  Description of Artificial Sequence: Synthetic oligonucleotide
  Target: COL7A1; (-) strand; PAM type: YTN; PAM sequence: TTT
ggccgcagtgtggggcccgc

SEQ ID NO: 27862 - DNA, 20 bp, Artificial Sequence
  Description of Artificial Sequence: Synthetic oligonucleotide
  Target: COL7A1; (-) strand; PAM type: YTN; PAM sequence: CTA
tttggccgcagtgtggggcc

SEQ ID NO: 27863 - DNA, 20 bp, Artificial Sequence
  Description of Artificial Sequence: Synthetic oligonucleotide
  Target: COL7A1; (-) strand; PAM type: YTN; PAM sequence: CTA
tgaggtgaccgtgagcaccc

SEQ ID NO: 27864 - DNA, 20 bp, Artificial Sequence
  Description of Artificial Sequence: Synthetic oligonucleotide
  Target: COL7A1; (-) strand; PAM type: YTN; PAM sequence: CTG
gcacggactatgaggtgacc

SEQ ID NO: 27865 - DNA, 20 bp, Artificial Sequence
  Description of Artificial Sequence: Synthetic oligonucleotide
  Target: COL7A1; (-) strand; PAM type: YTN; PAM sequence: TTG
gagcctggcacggactatga

SEQ ID NO: 27866 - DNA, 20 bp, Artificial Sequence
  Description of Artificial Sequence: Synthetic oligonucleotide
  Target: COL7A1; (-) strand; PAM type: YTN; PAM sequence: CTT
ggagcctggcacggactatg

SEQ ID NO: 27867 - DNA, 20 bp, Artificial Sequence
  Description of Artificial Sequence: Synthetic oligonucleotide
  Target: COL7A1; (-) strand; PAM type: YTN; PAM sequence: CTG
cgtgacttggagcctggcac

SEQ ID NO: 27868 - DNA, 20 bp, Artificial Sequence
  Description of Artificial Sequence: Synthetic oligonucleotide
  Target: COL7A1; (-) strand; PAM type: YTN; PAM sequence: TTG
ctgcgtgacttggagcctgg

SEQ ID NO: 27869 - DNA, 20 bp, Artificial Sequence
  Description of Artificial Sequence: Synthetic oligonucleotide
  Target: COL7A1; (-) strand; PAM type: YTN; PAM sequence: TTC
agtgttgctgcgtgacttgg

SEQ ID NO: 27870 - DNA, 20 bp, Artificial Sequence
  Description of Artificial Sequence: Synthetic oligonucleotide
  Target: COL7A1; (-) strand; PAM type: YTN; PAM sequence: CTG
ggcagggttcagtgttgctg

SEQ ID NO: 27871 - DNA, 20 bp, Artificial Sequence
  Description of Artificial Sequence: Synthetic oligonucleotide
  Target: COL7A1; (-) strand; PAM type: YTN; PAM sequence: CTG
ggccctgggcagggttcagt

SEQ ID NO: 27872 - DNA, 20 bp, Artificial Sequence
  Description of Artificial Sequence: Synthetic oligonucleotide
  Target: COL7A1; (-) strand; PAM type: YTN; PAM sequence: TTG
gtgtcccccatgcaggtggg

SEQ ID NO: 27873 - DNA, 20 bp, Artificial Sequence
  Description of Artificial Sequence: Synthetic oligonucleotide
  Target: COL7A1; (-) strand; PAM type: YTN; PAM sequence: CTT
ggtgtcccccatgcaggtgg

SEQ ID NO: 27874 - DNA, 20 bp, Artificial Sequence
  Description of Artificial Sequence: Synthetic oligonucleotide
  Target: COL7A1; (-) strand; PAM type: YTN; PAM sequence: CTG
gccccttggtgtcccccatg

SEQ ID NO: 27875 - DNA, 20 bp, Artificial Sequence
  Description of Artificial Sequence: Synthetic oligonucleotide
  Target: COL7A1; (-) strand; PAM type: YTN; PAM sequence: CTG
caaggcccactggccccttg

SEQ ID NO: 27876 - DNA, 20 bp, Artificial Sequence
  Description of Artificial Sequence: Synthetic oligonucleotide
  Target: COL7A1; (-) strand; PAM type: YTN; PAM sequence: CTG
agtctgcaaggcccactggc

SEQ ID NO: 27877 - DNA, 20 bp, Artificial Sequence
  Description of Artificial Sequence: Synthetic oligonucleotide
  Target: COL7A1; (-) strand; PAM type: YTN; PAM sequence: CTG
tagagtcctgagtctgcaag

SEQ ID NO: 27878 - DNA, 20 bp, Artificial Sequence
  Description of Artificial Sequence: Synthetic oligonucleotide
  Target: COL7A1; (-) strand; PAM type: YTN; PAM sequence: CTC
agacaaggctgtagagtcct

SEQ ID NO: 27879 - DNA, 20 bp, Artificial Sequence
  Description of Artificial Sequence: Synthetic oligonucleotide
  Target: COL7A1; (-) strand; PAM type: YTN; PAM sequence: CTG
aggggagtccccgcgcctca

SEQ ID NO: 27880 - DNA, 20 bp, Artificial Sequence
  Description of Artificial Sequence: Synthetic oligonucleotide
  Target: COL7A1; (-) strand; PAM type: YTN; PAM sequence: CTC
agtggtgagtgagagatgtg

SEQ ID NO: 27881 - DNA, 20 bp, Artificial Sequence
  Description of Artificial Sequence: Synthetic oligonucleotide
  Target: COL7A1; (-) strand; PAM type: YTN; PAM sequence: CTA
ccgtgtgacatggcgggtcc

SEQ ID NO: 27882 - DNA, 20 bp, Artificial Sequence
  Description of Artificial Sequence: Synthetic oligonucleotide
  Target: COL7A1; (-) strand; PAM type: YTN; PAM sequence: CTG
gctaccgtgtgacatggcgg

SEQ ID NO: 27883 - DNA, 20 bp, Artificial Sequence
  Description of Artificial Sequence: Synthetic oligonucleotide
  Target: COL7A1; (-) strand; PAM type: YTN; PAM sequence: CTG
gcggagtgtgccaggtgcca

SEQ ID NO: 27884 - DNA, 20 bp, Artificial Sequence
  Description of Artificial Sequence: Synthetic oligonucleotide
  Target: COL7A1; (-) strand; PAM type: YTN; PAM sequence: CTG
gtggcctggcggagtgtgcc

SEQ ID NO: 27885 - DNA, 20 bp, Artificial Sequence
  Description of Artificial Sequence: Synthetic oligonucleotide
  Target: COL7A1; (-) strand; PAM type: YTN; PAM sequence: CTC
ctggtggcctggcggagtgt

SEQ ID NO: 27886 - DNA, 20 bp, Artificial Sequence
  Description of Artificial Sequence: Synthetic oligonucleotide
  Target: COL7A1; (-) strand; PAM type: YTN; PAM sequence: CTG
accatccagaataccacagc

SEQ ID NO: 27887 - DNA, 20 bp, Artificial Sequence
  Description of Artificial Sequence: Synthetic oligonucleotide
  Target: COL7A1; (-) strand; PAM type: YTN; PAM sequence: CTA
gaagggccggaactgaccat

SEQ ID NO: 27888 - DNA, 20 bp, Artificial Sequence
  Description of Artificial Sequence: Synthetic oligonucleotide
  Target: COL7A1; (-) strand; PAM type: YTN; PAM sequence: CTG
ccctagaagggccggaactg

SEQ ID NO: 27889 - DNA, 20 bp, Artificial Sequence
  Description of Artificial Sequence: Synthetic oligonucleotide
  Target: COL7A1; (-) strand; PAM type: YTN; PAM sequence: CTC
ccccagctgccctagaaggg

SEQ ID NO: 27890 - DNA, 20 bp, Artificial Sequence
  Description of Artificial Sequence: Synthetic oligonucleotide
  Target: COL7A1; (-) strand; PAM type: YTN; PAM sequence: CTC
tcccccagctgccctagaag

SEQ ID NO: 27891 - DNA, 20 bp, Artificial Sequence
  Description of Artificial Sequence: Synthetic oligonucleotide
  Target: COL7A1; (-) strand; PAM type: YTN; PAM sequence: CTG
gtgggactctcccccagctg

SEQ ID NO: 27892 - DNA, 20 bp, Artificial Sequence
  Description of Artificial Sequence: Synthetic oligonucleotide
  Target: COL7A1; (-) strand; PAM type: YTN; PAM sequence: CTC
catgaatccctggtgggact

SEQ ID NO: 27893 - DNA, 20 bp, Artificial Sequence
  Description of Artificial Sequence: Synthetic oligonucleotide
  Target: COL7A1; (-) strand; PAM type: YTN; PAM sequence: CTG
actccatgaatccctggtgg

SEQ ID NO: 27894 - DNA, 20 bp, Artificial Sequence
  Description of Artificial Sequence: Synthetic oligonucleotide
  Target: COL7A1; (-) strand; PAM type: YTN; PAM sequence: TTC
tgactccatgaatccctggt

SEQ ID NO: 27895 - DNA, 20 bp, Artificial Sequence
  Description of Artificial Sequence: Synthetic oligonucleotide
  Target: COL7A1; (-) strand; PAM type: YTN; PAM sequence: CTT
ctgactccatgaatccctgg

SEQ ID NO: 27896 - DNA, 20 bp, Artificial Sequence
  Description of Artificial Sequence: Synthetic oligonucleotide
  Target: COL7A1; (-) strand; PAM type: YTN; PAM sequence: CTC
ccacttctgactccatgaat

SEQ ID NO: 27897 - DNA, 20 bp, Artificial Sequence
  Description of Artificial Sequence: Synthetic oligonucleotide
  Target: COL7A1; (-) strand; PAM type: YTN; PAM sequence: CTA
acccccgaccccagtacccc

SEQ ID NO: 27898 - DNA, 20 bp, Artificial Sequence
  Description of Artificial Sequence: Synthetic oligonucleotide
  Target: COL7A1; (-) strand; PAM type: YTN; PAM sequence: TTC
acctaacccccgaccccagt

SEQ ID NO: 27899 - DNA, 20 bp, Artificial Sequence
  Description of Artificial Sequence: Synthetic oligonucleotide
  Target: COL7A1; (-) strand; PAM type: YTN; PAM sequence: CTG
accccattcacctaaccccc

SEQ ID NO: 27900 - DNA, 20 bp, Artificial Sequence
  Description of Artificial Sequence: Synthetic oligonucleotide
  Target: COL7A1; (-) strand; PAM type: YTN; PAM sequence: CTC
tgaccccattcacctaaccc

SEQ ID NO: 27901 - DNA, 20 bp, Artificial Sequence
  Description of Artificial Sequence: Synthetic oligonucleotide
  Target: COL7A1; (-) strand; PAM type: YTN; PAM sequence: CTG
ccagcctctgaccccattca

SEQ ID NO: 27902 - DNA, 20 bp, Artificial Sequence
  Description of Artificial Sequence: Synthetic oligonucleotide
  Target: COL7A1; (-) strand; PAM type: YTN; PAM sequence: TTC
tgccagcctctgaccccatt

SEQ ID NO: 27903 - DNA, 20 bp, Artificial Sequence
  Description of Artificial Sequence: Synthetic oligonucleotide
  Target: COL7A1; (-) strand; PAM type: YTN; PAM sequence: CTC
ggaccagtgagcaattctgc

SEQ ID NO: 27904 - DNA, 20 bp, Artificial Sequence
  Description of Artificial Sequence: Synthetic oligonucleotide
  Target: COL7A1; (-) strand; PAM type: YTN; PAM sequence: CTG
tgagcgggacagctcggacc

SEQ ID NO: 27905 - DNA, 20 bp, Artificial Sequence
  Description of Artificial Sequence: Synthetic oligonucleotide
  Target: COL7A1; (-) strand; PAM type: YTN; PAM sequence: CTA
cgccaacagcatcggggagg

SEQ ID NO: 27906 - DNA, 20 bp, Artificial Sequence
  Description of Artificial Sequence: Synthetic oligonucleotide
  Target: COL7A1; (-) strand; PAM type: YTN; PAM sequence: CTC
tacgccaacagcatcgggga

SEQ ID NO: 27907 - DNA, 20 bp, Artificial Sequence
  Description of Artificial Sequence: Synthetic oligonucleotide
  Target: COL7A1; (-) strand; PAM type: YTN; PAM sequence: TTG
ccctctacgccaacagcatc

SEQ ID NO: 27908 - DNA, 20 bp, Artificial Sequence
  Description of Artificial Sequence: Synthetic oligonucleotide
  Target: COL7A1; (-) strand; PAM type: YTN; PAM sequence: CTG
tgattgccctctacgccaac

SEQ ID NO: 27909 - DNA, 20 bp, Artificial Sequence
  Description of Artificial Sequence: Synthetic oligonucleotide
  Target: COL7A1; (-) strand; PAM type: YTN; PAM sequence: CTG
accgagtaccaagtgactgt

SEQ ID NO: 27910 - DNA, 20 bp, Artificial Sequence
  Description of Artificial Sequence: Synthetic oligonucleotide
  Target: COL7A1; (-) strand; PAM type: YTN; PAM sequence: CTC
cggccactgaccgagtacca

SEQ ID NO: 27911 - DNA, 20 bp, Artificial Sequence
  Description of Artificial Sequence: Synthetic oligonucleotide
  Target: COL7A1; (-) strand; PAM type: YTN; PAM sequence: CTG
cggggtctccggccactgac

SEQ ID NO: 27912 - DNA, 20 bp, Artificial Sequence
  Description of Artificial Sequence: Synthetic oligonucleotide
  Target: COL7A1; (-) strand; PAM type: YTN; PAM sequence: CTG
gtgagaccagtgtgcggctg

SEQ ID NO: 27913 - DNA, 20 bp, Artificial Sequence
  Description of Artificial Sequence: Synthetic oligonucleotide
  Target: COL7A1; (-) strand; PAM type: YTN; PAM sequence: CTG
ggcaggtgaacgtcccagct

SEQ ID NO: 27914 - DNA, 20 bp, Artificial Sequence
  Description of Artificial Sequence: Synthetic oligonucleotide
  Target: COL7A1; (-) strand; PAM type: YTN; PAM sequence: TTG
ccctgggcaggtgaacgtcc

SEQ ID NO: 27915 - DNA, 20 bp, Artificial Sequence
  Description of Artificial Sequence: Synthetic oligonucleotide
  Target: COL7A1; (-) strand; PAM type: YTN; PAM sequence: CTT
gccctgggcaggtgaacgtc

SEQ ID NO: 27916 - DNA, 20 bp, Artificial Sequence
  Description of Artificial Sequence: Synthetic oligonucleotide
  Target: COL7A1; (-) strand; PAM type: YTN; PAM sequence: CTC
ttgccctgggcaggtgaacg

SEQ ID NO: 27917 - DNA, 20 bp, Artificial Sequence
  Description of Artificial Sequence: Synthetic oligonucleotide
  Target: COL7A1; (-) strand; PAM type: YTN; PAM sequence: CTG
ggcaagataaagtgacctct

SEQ ID NO: 27918 - DNA, 20 bp, Artificial Sequence
  Description of Artificial Sequence: Synthetic oligonucleotide
  Target: COL7A1; (-) strand; PAM type: YTN; PAM sequence: TTG
gctgggcaagataaagtgac

SEQ ID NO: 27919 - DNA, 20 bp, Artificial Sequence
  Description of Artificial Sequence: Synthetic oligonucleotide
  Target: COL7A1; (-) strand; PAM type: YTN; PAM sequence: CTT
ggctgggcaagataaagtga

SEQ ID NO: 27920 - DNA, 20 bp, Artificial Sequence
  Description of Artificial Sequence: Synthetic oligonucleotide
  Target: COL7A1; (-) strand; PAM type: YTN; PAM sequence: CTG
gggacttggctgggcaagat

SEQ ID NO: 27921 - DNA, 20 bp, Artificial Sequence
  Description of Artificial Sequence: Synthetic oligonucleotide
  Target: COL7A1; (-) strand; PAM type: YTN; PAM sequence: CTG
ccgagtgagcggcaggaggt

SEQ ID NO: 27922 - DNA, 20 bp, Artificial Sequence
  Description of Artificial Sequence: Synthetic oligonucleotide
  Target: COL7A1; (-) strand; PAM type: YTN; PAM sequence: CTG
ggacagccactgccgagtga

SEQ ID NO: 27923 - DNA, 20 bp, Artificial Sequence
  Description of Artificial Sequence: Synthetic oligonucleotide
  Target: COL7A1; (-) strand; PAM type: YTN; PAM sequence: CTG
acggggctgggacagccact

SEQ ID NO: 27924 - DNA, 20 bp, Artificial Sequence
  Description of Artificial Sequence: Synthetic oligonucleotide
  Target: COL7A1; (-) strand; PAM type: YTN; PAM sequence: CTC
tgacggggctgggacagcca

SEQ ID NO: 27925 - DNA, 20 bp, Artificial Sequence
  Description of Artificial Sequence: Synthetic oligonucleotide
  Target: COL7A1; (-) strand; PAM type: YTN; PAM sequence: CTC
ctctgacggggctgggacag

SEQ ID NO: 27926 - DNA, 20 bp, Artificial Sequence
  Description of Artificial Sequence: Synthetic oligonucleotide
  Target: COL7A1; (-) strand; PAM type: YTN; PAM sequence: CTA
caaggtccagtacactcctc

SEQ ID NO: 27927 - DNA, 20 bp, Artificial Sequence
  Description of Artificial Sequence: Synthetic oligonucleotide
  Target: COL7A1; (-) strand; PAM type: YTN; PAM sequence: CTG
gctacaaggtccagtacact

SEQ ID NO: 27928 - DNA, 20 bp, Artificial Sequence
  Description of Artificial Sequence: Synthetic oligonucleotide
  Target: COL7A1; (-) strand; PAM type: YTN; PAM sequence: CTG
tgactggctacaaggtccag

SEQ ID NO: 27929 - DNA, 20 bp, Artificial Sequence
  Description of Artificial Sequence: Synthetic oligonucleotide
  Target: COL7A1; (-) strand; PAM type: YTN; PAM sequence: TTG
agagtacagtggacagcggc

SEQ ID NO: 27930 - DNA, 20 bp, Artificial Sequence
  Description of Artificial Sequence: Synthetic oligonucleotide
  Target: COL7A1; (-) strand; PAM type: YTN; PAM sequence: CTT
gagagtacagtggacagcgg

SEQ ID NO: 27931 - DNA, 20 bp, Artificial Sequence
  Description of Artificial Sequence: Synthetic oligonucleotide
  Target: COL7A1; (-) strand; PAM type: YTN; PAM sequence: CTG
agccaagcagccaatccttg

SEQ ID NO: 27932 - DNA, 20 bp, Artificial Sequence
  Description of Artificial Sequence: Synthetic oligonucleotide
  Target: COL7A1; (-) strand; PAM type: YTN; PAM sequence: CTG
tctgagccaagcagccaatc

SEQ ID NO: 27933 - DNA, 20 bp, Artificial Sequence
  Description of Artificial Sequence: Synthetic oligonucleotide
  Target: COL7A1; (-) strand; PAM type: YTN; PAM sequence: CTG
gtgctgtctgagccaagcag

SEQ ID NO: 27934 - DNA, 20 bp, Artificial Sequence
  Description of Artificial Sequence: Synthetic oligonucleotide
  Target: COL7A1; (-) strand; PAM type: YTN; PAM sequence: CTC
cacgagacctggtgctgtct

SEQ ID NO: 27935 - DNA, 20 bp, Artificial Sequence
  Description of Artificial Sequence: Synthetic oligonucleotide
  Target: COL7A1; (-) strand; PAM type: YTN; PAM sequence: CTG
ctccacgagacctggtgctg

SEQ ID NO: 27936 - DNA, 20 bp, Artificial Sequence
  Description of Artificial Sequence: Synthetic oligonucleotide
  Target: COL7A1; (-) strand; PAM type: YTN; PAM sequence: CTC
tgctccacgagacctggtgc

SEQ ID NO: 27937 - DNA, 20 bp, Artificial Sequence
  Description of Artificial Sequence: Synthetic oligonucleotide
  Target: COL7A1; (-) strand; PAM type: YTN; PAM sequence: CTC
gacctctgctccacgagacc

SEQ ID NO: 27938 - DNA, 20 bp, Artificial Sequence
  Description of Artificial Sequence: Synthetic oligonucleotide
  Target: COL7A1; (-) strand; PAM type: YTN; PAM sequence: TTC
ccagcggatgactcgacctc

SEQ ID NO: 27939 - DNA, 20 bp, Artificial Sequence
  Description of Artificial Sequence: Synthetic oligonucleotide
  Target: COL7A1; (-) strand; PAM type: YTN; PAM sequence: CTG
atcccgcattcccagcggat

SEQ ID NO: 27940 - DNA, 20 bp, Artificial Sequence
  Description of Artificial Sequence: Synthetic oligonucleotide
  Target: COL7A1; (-) strand; PAM type: YTN; PAM sequence: CTG
atcccctgatcccgcattcc

SEQ ID NO: 27941 - DNA, 20 bp, Artificial Sequence
  Description of Artificial Sequence: Synthetic oligonucleotide
  Target: COL7A1; (-) strand; PAM type: YTN; PAM sequence: CTG
cctgatcccctgatcccgca

SEQ ID NO: 27942 - DNA, 20 bp, Artificial Sequence
  Description of Artificial Sequence: Synthetic oligonucleotide
  Target: COL7A1; (-) strand; PAM type: YTN; PAM sequence: CTC
ctgcctgatcccctgatccc

SEQ ID NO: 27943 - DNA, 20 bp, Artificial Sequence
  Description of Artificial Sequence: Synthetic oligonucleotide
  Target: COL7A1; (-) strand; PAM type: YTN; PAM sequence: CTG
catcatacatgcccacccca

SEQ ID NO: 27944 - DNA, 20 bp, Artificial Sequence
  Description of Artificial Sequence: Synthetic oligonucleotide
  Target: COL7A1; (-) strand; PAM type: YTN; PAM sequence: CTC
tgcatcatacatgcccaccc

SEQ ID NO: 27945 - DNA, 20 bp, Artificial Sequence
  Description of Artificial Sequence: Synthetic oligonucleotide
  Target: COL7A1; (-) strand; PAM type: YTN; PAM sequence: CTG
accccgaccccaactctgca

SEQ ID NO: 27946 - DNA, 20 bp, Artificial Sequence
  Description of Artificial Sequence: Synthetic oligonucleotide
  Target: COL7A1; (-) strand; PAM type: YTN; PAM sequence: CTC
ctgaccccgaccccaactct

SEQ ID NO: 27947 - DNA, 20 bp, Artificial Sequence
  Description of Artificial Sequence: Synthetic oligonucleotide
  Target: COL7A1; (-) strand; PAM type: YTN; PAM sequence: CTA
tgtgctcctgaccccgaccc

SEQ ID NO: 27948 - DNA, 20 bp, Artificial Sequence
  Description of Artificial Sequence: Synthetic oligonucleotide
  Target: COL7A1; (-) strand; PAM type: YTN; PAM sequence: TTC
catcctatgtgctcctgacc

SEQ ID NO: 27949 - DNA, 20 bp, Artificial Sequence
  Description of Artificial Sequence: Synthetic oligonucleotide
  Target: COL7A1; (-) strand; PAM type: YTN; PAM sequence: CTG
attccatcctatgtgctcct

SEQ ID NO: 27950 - DNA, 20 bp, Artificial Sequence
  Description of Artificial Sequence: Synthetic oligonucleotide
  Target: COL7A1; (-) strand; PAM type: YTN; PAM sequence: TTG
gcagtgctgattccatccta

SEQ ID NO: 27951 - DNA, 20 bp, Artificial Sequence
  Description of Artificial Sequence: Synthetic oligonucleotide
  Target: COL7A1; (-) strand; PAM type: YTN; PAM sequence: CTT
ggcagtgctgattccatcct

SEQ ID NO: 27952 - DNA, 20 bp, Artificial Sequence
  Description of Artificial Sequence: Synthetic oligonucleotide
  Target: COL7A1; (-) strand; PAM type: YTN; PAM sequence: CTA
gaccccggaccccaatcccc

SEQ ID NO: 27953 - DNA, 20 bp, Artificial Sequence
  Description of Artificial Sequence: Synthetic oligonucleotide
  Target: COL7A1; (-) strand; PAM type: YTN; PAM sequence: CTG
acctagaccccggaccccaa

SEQ ID NO: 27954 - DNA, 20 bp, Artificial Sequence
  Description of Artificial Sequence: Synthetic oligonucleotide
  Target: COL7A1; (-) strand; PAM type: YTN; PAM sequence: CTG
cccacacggtgtaccctgac

SEQ ID NO: 27955 - DNA, 20 bp, Artificial Sequence
  Description of Artificial Sequence: Synthetic oligonucleotide
  Target: COL7A1; (-) strand; PAM type: YTN; PAM sequence: TTC
ctgcccacacggtgtaccct

SEQ ID NO: 27956 - DNA, 20 bp, Artificial Sequence
  Description of Artificial Sequence: Synthetic oligonucleotide
  Target: COL7A1; (-) strand; PAM type: YTN; PAM sequence: CTC
gtgagttcctgcccacacgg

SEQ ID NO: 27957 - DNA, 20 bp, Artificial Sequence
  Description of Artificial Sequence: Synthetic oligonucleotide
  Target: COL7A1; (-) strand; PAM type: YTN; PAM sequence: CTG
tgacccgacctcgtgagttc

SEQ ID NO: 27958 - DNA, 20 bp, Artificial Sequence
  Description of Artificial Sequence: Synthetic oligonucleotide
  Target: COL7A1; (-) strand; PAM type: YTN; PAM sequence: CTG
gtggcgtgcctgtgacccga

SEQ ID NO: 27959 - DNA, 20 bp, Artificial Sequence
  Description of Artificial Sequence: Synthetic oligonucleotide
  Target: COL7A1; (-) strand; PAM type: YTN; PAM sequence: CTG
ctggtggcgtgcctgtgacc

SEQ ID NO: 27960 - DNA, 20 bp, Artificial Sequence
  Description of Artificial Sequence: Synthetic oligonucleotide
  Target: COL7A1; (-) strand; PAM type: YTN; PAM sequence: TTC
ccggagagtgtgcacgactg

SEQ ID NO: 27961 - DNA, 20 bp, Artificial Sequence
  Description of Artificial Sequence: Synthetic oligonucleotide
  Target: COL7A1; (-) strand; PAM type: YTN; PAM sequence: TTT
cccggagagtgtgcacgact

SEQ ID NO: 27962 - DNA, 20 bp, Artificial Sequence
  Description of Artificial Sequence: Synthetic oligonucleotide
  Target: COL7A1; (-) strand; PAM type: YTN; PAM sequence: CTC
gtttcccggagagtgtgcac

SEQ ID NO: 27963 - DNA, 20 bp, Artificial Sequence
  Description of Artificial Sequence: Synthetic oligonucleotide
  Target: COL7A1; (-) strand; PAM type: YTN; PAM sequence: CTG
cccctcgtttcccggagagt

SEQ ID NO: 27964 - DNA, 20 bp, Artificial Sequence
  Description of Artificial Sequence: Synthetic oligonucleotide
  Target: COL7A1; (-) strand; PAM type: YTN; PAM sequence: CTA
ctgcccctcgtttcccggag

SEQ ID NO: 27965 - DNA, 20 bp, Artificial Sequence
  Description of Artificial Sequence: Synthetic oligonucleotide
  Target: COL7A1; (-) strand; PAM type: YTN; PAM sequence: TTG
aggacactactgcccctcgt

SEQ ID NO: 27966 - DNA, 20 bp, Artificial Sequence
  Description of Artificial Sequence: Synthetic oligonucleotide
  Target: COL7A1; (-) strand; PAM type: YTN; PAM sequence: CTT
gaggacactactgcccctcg

SEQ ID NO: 27967 - DNA, 20 bp, Artificial Sequence
  Description of Artificial Sequence: Synthetic oligonucleotide
  Target: COL7A1; (-) strand; PAM type: YTN; PAM sequence: TTC
agcatcttgaggacactact

SEQ ID NO: 27968 - DNA, 20 bp, Artificial Sequence
  Description of Artificial Sequence: Synthetic oligonucleotide
  Target: COL7A1; (-) strand; PAM type: YTN; PAM sequence: CTT
cagcatcttgaggacactac

SEQ ID NO: 27969 - DNA, 20 bp, Artificial Sequence
  Description of Artificial Sequence: Synthetic oligonucleotide
  Target: COL7A1; (-) strand; PAM type: YTN; PAM sequence: TTC
gtcaatgacttcagcatctt

SEQ ID NO: 27970 - DNA, 20 bp, Artificial Sequence
  Description of Artificial Sequence: Synthetic oligonucleotide
  Target: COL7A1; (-) strand; PAM type: YTN; PAM sequence: CTT
cgtcaatgacttcagcatct

SEQ ID NO: 27971 - DNA, 20 bp, Artificial Sequence
  Description of Artificial Sequence: Synthetic oligonucleotide
  Target: COL7A1; (-) strand; PAM type: YTN; PAM sequence: TTC
ttcgtcaatgacttcagcat

SEQ ID NO: 27972 - DNA, 20 bp, Artificial Sequence
  Description of Artificial Sequence: Synthetic oligonucleotide
  Target: COL7A1; (-) strand; PAM type: YTN; PAM sequence: CTT
cttcgtcaatgacttcagca

SEQ ID NO: 27973 - DNA, 20 bp, Artificial Sequence
  Description of Artificial Sequence: Synthetic oligonucleotide
  Target: COL7A1; (-) strand; PAM type: YTN; PAM sequence: TTC
ttcttcgtcaatgacttcag

SEQ ID NO: 27974 - DNA, 20 bp, Artificial Sequence
  Description of Artificial Sequence: Synthetic oligonucleotide
  Target: COL7A1; (-) strand; PAM type: YTN; PAM sequence: CTT
cttcttcgtcaatgacttca

SEQ ID NO: 27975 - DNA, 20 bp, Artificial Sequence
  Description of Artificial Sequence: Synthetic oligonucleotide
  Target: COL7A1; (-) strand; PAM type: YTN; PAM sequence: TTC
ttcttcttcgtcaatgactt

SEQ ID NO: 27976 - DNA, 20 bp, Artificial Sequence
  Description of Artificial Sequence: Synthetic oligonucleotide
  Target: COL7A1; (-) strand; PAM type: YTN; PAM sequence: CTT
cttcttcttcgtcaatgact

SEQ ID NO: 27977 - DNA, 20 bp, Artificial Sequence
  Description of Artificial Sequence: Synthetic oligonucleotide
  Target: COL7A1; (-) strand; PAM type: YTN; PAM sequence: CTC
acagcccaccagtgacttct

SEQ ID NO: 27978 - DNA, 20 bp, Artificial Sequence
  Description of Artificial Sequence: Synthetic oligonucleotide
  Target: COL7A1; (-) strand; PAM type: YTN; PAM sequence: TTG
cctcacagcccaccagtgac

SEQ ID NO: 27979 - DNA, 20 bp, Artificial Sequence
  Description of Artificial Sequence: Synthetic oligonucleotide
  Target: COL7A1; (-) strand; PAM type: YTN; PAM sequence: CTG
aagcgagttgcctcacagcc

SEQ ID NO: 27980 - DNA, 20 bp, Artificial Sequence
  Description of Artificial Sequence: Synthetic oligonucleotide
  Target: COL7A1; (-) strand; PAM type: YTN; PAM sequence: CTG
aggagctgaagcgagttgcc

SEQ ID NO: 27981 - DNA, 20 bp, Artificial Sequence
  Description of Artificial Sequence: Synthetic oligonucleotide
  Target: COL7A1; (-) strand; PAM type: YTN; PAM sequence: CTG
accctgaggagctgaagcga

SEQ ID NO: 27982 - DNA, 20 bp, Artificial Sequence
  Description of Artificial Sequence: Synthetic oligonucleotide
  Target: COL7A1; (-) strand; PAM type: YTN; PAM sequence: TTC
agggatcaagaatgctgacc

SEQ ID NO: 27983 - DNA, 20 bp, Artificial Sequence
  Description of Artificial Sequence: Synthetic oligonucleotide
  Target: COL7A1; (-) strand; PAM type: YTN; PAM sequence: CTT
cagggatcaagaatgctgac

SEQ ID NO: 27984 - DNA, 20 bp, Artificial Sequence
  Description of Artificial Sequence: Synthetic oligonucleotide
  Target: COL7A1; (-) strand; PAM type: YTN; PAM sequence: CTG
atgggtcgtcacttcaggga

SEQ ID NO: 27985 - DNA, 20 bp, Artificial Sequence
  Description of Artificial Sequence: Synthetic oligonucleotide
  Target: COL7A1; (-) strand; PAM type: YTN; PAM sequence: CTG
agtcctgatgggtcgtcact

SEQ ID NO: 27986 - DNA, 20 bp, Artificial Sequence
  Description of Artificial Sequence: Synthetic oligonucleotide
  Target: COL7A1; (-) strand; PAM type: YTN; PAM sequence: CTG
gggggtgggggcagtcagag

SEQ ID NO: 27987 - DNA, 20 bp, Artificial Sequence
  Description of Artificial Sequence: Synthetic oligonucleotide
  Target: COL7A1; (-) strand; PAM type: YTN; PAM sequence: CTG
tgggtaaggaccgagcagga

SEQ ID NO: 27988 - DNA, 20 bp, Artificial Sequence
  Description of Artificial Sequence: Synthetic oligonucleotide
  Target: COL7A1; (-) strand; PAM type: YTN; PAM sequence: TTG
ctgtgggtaaggaccgagca

SEQ ID NO: 27989 - DNA, 20 bp, Artificial Sequence
  Description of Artificial Sequence: Synthetic oligonucleotide
  Target: COL7A1; (-) strand; PAM type: YTN; PAM sequence: TTT
gctgtgggtaaggaccgagc

SEQ ID NO: 27990 - DNA, 20 bp, Artificial Sequence
  Description of Artificial Sequence: Synthetic oligonucleotide
  Target: COL7A1; (-) strand; PAM type: YTN; PAM sequence: CTA
tttgctgtgggtaaggaccg

SEQ ID NO: 27991 - DNA, 20 bp, Artificial Sequence
  Description of Artificial Sequence: Synthetic oligonucleotide
  Target: COL7A1; (-) strand; PAM type: YTN; PAM sequence: CTG
aaggggcagggggtcaagct

SEQ ID NO: 27992 - DNA, 20 bp, Artificial Sequence
  Description of Artificial Sequence: Synthetic oligonucleotide
  Target: COL7A1; (-) strand; PAM type: YTN; PAM sequence: CTG
cccaaaggctgaaggggcag

SEQ ID NO: 27993 - DNA, 20 bp, Artificial Sequence
  Description of Artificial Sequence: Synthetic oligonucleotide
  Target: COL7A1; (-) strand; PAM type: YTN; PAM sequence: CTG
gtggacacagctgcccaaag

SEQ ID NO: 27994 - DNA, 20 bp, Artificial Sequence
  Description of Artificial Sequence: Synthetic oligonucleotide
  Target: COL7A1; (-) strand; PAM type: YTN; PAM sequence: CTG
atcacagacgggaagtccca

SEQ ID NO: 27995 - DNA, 20 bp, Artificial Sequence
  Description of Artificial Sequence: Synthetic oligonucleotide
  Target: COL7A1; (-) strand; PAM type: YTN; PAM sequence: CTG
catcctgatcacagacggga

SEQ ID NO: 27996 - DNA, 20 bp, Artificial Sequence
  Description of Artificial Sequence: Synthetic oligonucleotide
  Target: COL7A1; (-) strand; PAM type: YTN; PAM sequence: CTG
tcccaggtctgcatcctgat

SEQ ID NO: 27997 - DNA, 20 bp, Artificial Sequence
  Description of Artificial Sequence: Synthetic oligonucleotide
  Target: COL7A1; (-) strand; PAM type: YTN; PAM sequence: CTG
cacctgtcccaggtctgcat

SEQ ID NO: 27998 - DNA, 20 bp, Artificial Sequence
  Description of Artificial Sequence: Synthetic oligonucleotide
  Target: COL7A1; (-) strand; PAM type: YTN; PAM sequence: TTG
acccctgcacctgtcccagg

SEQ ID NO: 27999 - DNA, 20 bp, Artificial Sequence
  Description of Artificial Sequence: Synthetic oligonucleotide
  Target: COL7A1; (-) strand; PAM type: YTN; PAM sequence: TTT
gacccctgcacctgtcccag

SEQ ID NO: 28000 - DNA, 20 bp, Artificial Sequence
  Description of Artificial Sequence: Synthetic oligonucleotide
  Target: COL7A1; (-) strand; PAM type: YTN; PAM sequence: CTC
ccaagatgaccccaaatgaa

SEQ ID NO: 28001 - DNA, 20 bp, Artificial Sequence
  Description of Artificial Sequence: Synthetic oligonucleotide
  Target: COL7A1; (-) strand; PAM type: YTN; PAM sequence: CTA
ccatgcctcccaagatgacc

SEQ ID NO: 28002 - DNA, 20 bp, Artificial Sequence
  Description of Artificial Sequence: Synthetic oligonucleotide
  Target: COL7A1; (-) strand; PAM type: YTN; PAM sequence: CTA
cccctaccatgcctcccaag

SEQ ID NO: 28003 - DNA, 20 bp, Artificial Sequence
  Description of Artificial Sequence: Synthetic oligonucleotide
  Target: COL7A1; (-) strand; PAM type: YTN; PAM sequence: CTG
gtgtccccaaggtgatccct

SEQ ID NO: 28004 - DNA, 20 bp, Artificial Sequence
  Description of Artificial Sequence: Synthetic oligonucleotide
  Target: COL7A1; (-) strand; PAM type: YTN; PAM sequence: CTG
gcccgacctggtgtccccaa

SEQ ID NO: 28005 - DNA, 20 bp, Artificial Sequence
  Description of Artificial Sequence: Synthetic oligonucleotide
  Target: COL7A1; (-) strand; PAM type: YTN; PAM sequence: CTG
ccccagctggcccgacctgg

SEQ ID NO: 28006 - DNA, 20 bp, Artificial Sequence
  Description of Artificial Sequence: Synthetic oligonucleotide
  Target: COL7A1; (-) strand; PAM type: YTN; PAM sequence: TTC
ctgccccagctggcccgacc

SEQ ID NO: 28007 - DNA, 20 bp, Artificial Sequence
  Description of Artificial Sequence: Synthetic oligonucleotide
  Target: COL7A1; (-) strand; PAM type: YTN; PAM sequence: CTT
cctgccccagctggcccgac

SEQ ID NO: 28008 - DNA, 20 bp, Artificial Sequence
  Description of Artificial Sequence: Synthetic oligonucleotide
  Target: COL7A1; (-) strand; PAM type: YTN; PAM sequence: CTG
accatgtcttcctgccccag

SEQ ID NO: 28009 - DNA, 20 bp, Artificial Sequence
  Description of Artificial Sequence: Synthetic oligonucleotide
  Target: COL7A1; (-) strand; PAM type: YTN; PAM sequence: CTC
catgtggctgaccatgtctt

SEQ ID NO: 28010 - DNA, 20 bp, Artificial Sequence
  Description of Artificial Sequence: Synthetic oligonucleotide
  Target: COL7A1; (-) strand; PAM type: YTN; PAM sequence: TTC
tccatgtggctgaccatgtc

SEQ ID NO: 28011 - DNA, 20 bp, Artificial Sequence
  Description of Artificial Sequence: Synthetic oligonucleotide
  Target: COL7A1; (-) strand; PAM type: YTN; PAM sequence: CTG
caattctccatgtggctgac

SEQ ID NO: 28012 - DNA, 20 bp, Artificial Sequence
  Description of Artificial Sequence: Synthetic oligonucleotide
  Target: COL7A1; (-) strand; PAM type: YTN; PAM sequence: CTC
gcacaggggctgcaattctc

SEQ ID NO: 28013 - DNA, 20 bp, Artificial Sequence
  Description of Artificial Sequence: Synthetic oligonucleotide
  Target: COL7A1; (-) strand; PAM type: YTN; PAM sequence: CTA
caaggggggcaacactcgca

SEQ ID NO: 28014 - DNA, 20 bp, Artificial Sequence
  Description of Artificial Sequence: Synthetic oligonucleotide
  Target: COL7A1; (-) strand; PAM type: YTN; PAM sequence: TTA
gctacaaggggggcaacact

SEQ ID NO: 28015 - DNA, 20 bp, Artificial Sequence
  Description of Artificial Sequence: Synthetic oligonucleotide
  Target: COL7A1; (-) strand; PAM type: YTN; PAM sequence: CTT
agctacaaggggggcaacac

SEQ ID NO: 28016 - DNA, 20 bp, Artificial Sequence
  Description of Artificial Sequence: Synthetic oligonucleotide
  Target: COL7A1; (-) strand; PAM type: YTN; PAM sequence: CTG
ggggtgatgtgatccgcgcc

SEQ ID NO: 28017 - DNA, 20 bp, Artificial Sequence
  Description of Artificial Sequence: Synthetic oligonucleotide
  Target: COL7A1; (-) strand; PAM type: YTN; PAM sequence: CTC
tgggggtgatgtgatccgcg

SEQ ID NO: 28018 - DNA, 20 bp, Artificial Sequence
  Description of Artificial Sequence: Synthetic oligonucleotide
  Target: COL7A1; (-) strand; PAM type: YTN; PAM sequence: TTG
gctctgggggtgatgtgatc

SEQ ID NO: 28019 - DNA, 20 bp, Artificial Sequence
  Description of Artificial Sequence: Synthetic oligonucleotide
  Target: COL7A1; (-) strand; PAM type: YTN; PAM sequence: CTT
ggctctgggggtgatgtgat

SEQ ID NO: 28020 - DNA, 20 bp, Artificial Sequence
  Description of Artificial Sequence: Synthetic oligonucleotide
  Target: COL7A1; (-) strand; PAM type: YTN; PAM sequence: CTG
gatgcacttggctctggggg

SEQ ID NO: 28021 - DNA, 20 bp, Artificial Sequence
  Description of Artificial Sequence: Synthetic oligonucleotide
  Target: COL7A1; (-) strand; PAM type: YTN; PAM sequence: TTC
ggcctggatgcacttggctc

SEQ ID NO: 28022 - DNA, 20 bp, Artificial Sequence
  Description of Artificial Sequence: Synthetic oligonucleotide
  Target: COL7A1; (-) strand; PAM type: YTN; PAM sequence: CTC
caacaggacagagttcggcc

SEQ ID NO: 28023 - DNA, 20 bp, Artificial Sequence
  Description of Artificial Sequence: Synthetic oligonucleotide
  Target: COL7A1; (-) strand; PAM type: YTN; PAM sequence: CTA
ccctccaacaggacagagtt

SEQ ID NO: 28024 - DNA, 20 bp, Artificial Sequence
  Description of Artificial Sequence: Synthetic oligonucleotide
  Target: COL7A1; (-) strand; PAM type: YTN; PAM sequence: TTG
ccacccctaccctccaacag

SEQ ID NO: 28025 - DNA, 20 bp, Artificial Sequence
  Description of Artificial Sequence: Synthetic oligonucleotide
  Target: COL7A1; (-) strand; PAM type: YTN; PAM sequence: CTG
ttgccacccctaccctccaa

SEQ ID NO: 28026 - DNA, 20 bp, Artificial Sequence
  Description of Artificial Sequence: Synthetic oligonucleotide
  Target: COL7A1; (-) strand; PAM type: YTN; PAM sequence: CTA
gcctgttgccacccctaccc

SEQ ID NO: 28027 - DNA, 20 bp, Artificial Sequence
  Description of Artificial Sequence: Synthetic oligonucleotide
  Target: COL7A1; (-) strand; PAM type: YTN; PAM sequence: CTG
agtcctagcctgttgccacc

SEQ ID NO: 28028 - DNA, 20 bp, Artificial Sequence
  Description of Artificial Sequence: Synthetic oligonucleotide
  Target: COL7A1; (-) strand; PAM type: YTN; PAM sequence: CTC
aaggccagggccagaagaga

SEQ ID NO: 28029 - DNA, 20 bp, Artificial Sequence
  Description of Artificial Sequence: Synthetic oligonucleotide
  Target: COL7A1; (-) strand; PAM type: YTN; PAM sequence: CTC
ctcaaggccagggccagaag

SEQ ID NO: 28030 - DNA, 20 bp, Artificial Sequence
  Description of Artificial Sequence: Synthetic oligonucleotide
  Target: COL7A1; (-) strand; PAM type: YTN; PAM sequence: CTA
gaggcctcctcaaggccagg

SEQ ID NO: 28031 - DNA, 20 bp, Artificial Sequence
  Description of Artificial Sequence: Synthetic oligonucleotide
  Target: COL7A1; (-) strand; PAM type: YTN; PAM sequence: CTC
accctagaggcctcctcaag

SEQ ID NO: 28032 - DNA, 20 bp, Artificial Sequence
  Description of Artificial Sequence: Synthetic oligonucleotide
  Target: COL7A1; (-) strand; PAM type: YTN; PAM sequence: CTG
atacccgtaaccctcaccct

SEQ ID NO: 28033 - DNA, 20 bp, Artificial Sequence
  Description of Artificial Sequence: Synthetic oligonucleotide
  Target: COL7A1; (-) strand; PAM type: YTN; PAM sequence: CTC
aagagagcctgatacccgta

SEQ ID NO: 28034 - DNA, 20 bp, Artificial Sequence
  Description of Artificial Sequence: Synthetic oligonucleotide
  Target: COL7A1; (-) strand; PAM type: YTN; PAM sequence: TTC
cagaggcaagtgggtgtgga

SEQ ID NO: 28035 - DNA, 20 bp, Artificial Sequence
  Description of Artificial Sequence: Synthetic oligonucleotide
  Target: COL7A1; (-) strand; PAM type: YTN; PAM sequence: CTG
ggggttccagaggcaagtgg

SEQ ID NO: 28036 - DNA, 20 bp, Artificial Sequence
  Description of Artificial Sequence: Synthetic oligonucleotide
  Target: COL7A1; (-) strand; PAM type: YTN; PAM sequence: TTA
acctgggggttccagaggca

SEQ ID NO: 28037 - DNA, 20 bp, Artificial Sequence
  Description of Artificial Sequence: Synthetic oligonucleotide
  Target: COL7A1; (-) strand; PAM type: YTN; PAM sequence: TTG
ttaacctgggggttccagag

SEQ ID NO: 28038 - DNA, 20 bp, Artificial Sequence
  Description of Artificial Sequence: Synthetic oligonucleotide
  Target: COL7A1; (-) strand; PAM type: YTN; PAM sequence: TTT
gttaacctgggggttccaga

SEQ ID NO: 28039 - DNA, 20 bp, Artificial Sequence
  Description of Artificial Sequence: Synthetic oligonucleotide
  Target: COL7A1; (-) strand; PAM type: YTN; PAM sequence: CTG
gggagtttgttaacctgggg

SEQ ID NO: 28040 - DNA, 20 bp, Artificial Sequence
  Description of Artificial Sequence: Synthetic oligonucleotide
  Target: COL7A1; (-) strand; PAM type: YTN; PAM sequence: CTG
cagatggtgcacaaaggagc

SEQ ID NO: 28041 - DNA, 20 bp, Artificial Sequence
  Description of Artificial Sequence: Synthetic oligonucleotide
  Target: COL7A1; (-) strand; PAM type: YTN; PAM sequence: CTG
cccaggcccacctgcagatg

SEQ ID NO: 28042 - DNA, 20 bp, Artificial Sequence
  Description of Artificial Sequence: Synthetic oligonucleotide
  Target: COL7A1; (-) strand; PAM type: YTN; PAM sequence: TTC
aggtctgcccaggcccacct

SEQ ID NO: 28043 - DNA, 20 bp, Artificial Sequence
  Description of Artificial Sequence: Synthetic oligonucleotide
  Target: COL7A1; (-) strand; PAM type: YTN; PAM sequence: CTT
caggtctgcccaggcccacc

SEQ ID NO: 28044 - DNA, 20 bp, Artificial Sequence
  Description of Artificial Sequence: Synthetic oligonucleotide
  Target: COL7A1; (-) strand; PAM type: YTN; PAM sequence: CTC
cttcaggtctgcccaggccc

SEQ ID NO: 28045 - DNA, 20 bp, Artificial Sequence
  Description of Artificial Sequence: Synthetic oligonucleotide
  Target: COL7A1; (-) strand; PAM type: YTN; PAM sequence: CTA
agggctccttcaggtctgcc

SEQ ID NO: 28046 - DNA, 20 bp, Artificial Sequence
  Description of Artificial Sequence: Synthetic oligonucleotide
  Target: COL7A1; (-) strand; PAM type: YTN; PAM sequence: CTG
tgagcccctaagggctcctt

SEQ ID NO: 28047 - DNA, 20 bp, Artificial Sequence
  Description of Artificial Sequence: Synthetic oligonucleotide
  Target: COL7A1; (-) strand; PAM type: YTN; PAM sequence: TTC
cccacagactgtgagcccct

SEQ ID NO: 28048 - DNA, 20 bp, Artificial Sequence
  Description of Artificial Sequence: Synthetic oligonucleotide
  Target: COL7A1; (-) strand; PAM type: YTN; PAM sequence: TTG
ttccccacagactgtgagcc

SEQ ID NO: 28049 - DNA, 20 bp, Artificial Sequence
  Description of Artificial Sequence: Synthetic oligonucleotide
  Target: COL7A1; (-) strand; PAM type: YTN; PAM sequence: CTT
gttccccacagactgtgagc

SEQ ID NO: 28050 - DNA, 20 bp, Artificial Sequence
  Description of Artificial Sequence: Synthetic oligonucleotide
  Target: COL7A1; (-) strand; PAM type: YTN; PAM sequence: TTA
agcagcatcttgttccccac

SEQ ID NO: 28051 - DNA, 20 bp, Artificial Sequence
  Description of Artificial Sequence: Synthetic oligonucleotide
  Target: COL7A1; (-) strand; PAM type: YTN; PAM sequence: TTA
attaagcagcatcttgttcc

SEQ ID NO: 28052 - DNA, 20 bp, Artificial Sequence
  Description of Artificial Sequence: Synthetic oligonucleotide
  Target: COL7A1; (-) strand; PAM type: YTN; PAM sequence: TTT
aattaagcagcatcttgttc

SEQ ID NO: 28053 - DNA, 20 bp, Artificial Sequence
  Description of Artificial Sequence: Synthetic oligonucleotide
  Target: COL7A1; (-) strand; PAM type: YTN; PAM sequence: TTA
tttaattaagcagcatcttg

SEQ ID NO: 28054 - DNA, 20 bp, Artificial Sequence
  Description of Artificial Sequence: Synthetic oligonucleotide
  Target: COL7A1; (-) strand; PAM type: YTN; PAM sequence: CTG
caattatttaattaagcagc

SEQ ID NO: 28055 - DNA, 20 bp, Artificial Sequence
  Description of Artificial Sequence: Synthetic oligonucleotide
  Target: COL7A1; (-) strand; PAM type: YTN; PAM sequence: CTC
ctgcaattatttaattaagc

SEQ ID NO: 28056 - DNA, 20 bp, Artificial Sequence
  Description of Artificial Sequence: Synthetic oligonucleotide
  Target: COL7A1; (-) strand; PAM type: YTN; PAM sequence: CTC
ctcctgcaattatttaatta

SEQ ID NO: 28057 - DNA, 20 bp, Artificial Sequence
  Description of Artificial Sequence: Synthetic oligonucleotide
  Target: COL7A1; (-) strand; PAM type: YTN; PAM sequence: CTG
gacccctcctcctgcaatta

SEQ ID NO: 28058 - DNA, 20 bp, Artificial Sequence
  Description of Artificial Sequence: Synthetic oligonucleotide
  Target: COL7A1; (-) strand; PAM type: YTN; PAM sequence: CTA
catctggacccctcctcctg

SEQ ID NO: 28059 - DNA, 20 bp, Artificial Sequence
  Description of Artificial Sequence: Synthetic oligonucleotide
  Target: COL7A1; (-) strand; PAM type: YTN; PAM sequence: TTC
ctacatctggacccctcctc

SEQ ID NO: 28060 - DNA, 20 bp, Artificial Sequence
  Description of Artificial Sequence: Synthetic oligonucleotide
  Target: COL7A1; (-) strand; PAM type: YTN; PAM sequence: TTT
cctacatctggacccctcct

SEQ ID NO: 28061 - DNA, 20 bp, Artificial Sequence
  Description of Artificial Sequence: Synthetic oligonucleotide
  Target: COL7A1; (-) strand; PAM type: YTN; PAM sequence: CTT
tcctacatctggacccctcc

SEQ ID NO: 28062 - DNA, 20 bp, Artificial Sequence
  Description of Artificial Sequence: Synthetic oligonucleotide
  Target: COL7A1; (-) strand; PAM type: YTN; PAM sequence: CTG
gccagcatccactttcctac

SEQ ID NO: 28063 - DNA, 20 bp, Artificial Sequence
  Description of Artificial Sequence: Synthetic oligonucleotide
  Target: COL7A1; (-) strand; PAM type: YTN; PAM sequence: CTC
catctggccagcatccactt

SEQ ID NO: 28064 - DNA, 20 bp, Artificial Sequence
  Description of Artificial Sequence: Synthetic oligonucleotide
  Target: COL7A1; (-) strand; PAM type: YTN; PAM sequence: TTC
accagaggtgctccatctgg

SEQ ID NO: 28065 - DNA, 20 bp, Artificial Sequence
  Description of Artificial Sequence: Synthetic oligonucleotide
  Target: COL7A1; (-) strand; PAM type: YTN; PAM sequence: TTG
cagccgttcaccagaggtgc

SEQ ID NO: 28066 - DNA, 20 bp, Artificial Sequence
  Description of Artificial Sequence: Synthetic oligonucleotide
  Target: COL7A1; (-) strand; PAM type: YTN; PAM sequence: CTT
gcagccgttcaccagaggtg

SEQ ID NO: 28067 - DNA, 20 bp, Artificial Sequence
  Description of Artificial Sequence: Synthetic oligonucleotide
  Target: COL7A1; (-) strand; PAM type: YTN; PAM sequence: CTA
acccttgcagccgttcacca

SEQ ID NO: 28068 - DNA, 20 bp, Artificial Sequence
  Description of Artificial Sequence: Synthetic oligonucleotide
  Target: COL7A1; (-) strand; PAM type: YTN; PAM sequence: CTC
taacccttgcagccgttcac

SEQ ID NO: 28069 - DNA, 20 bp, Artificial Sequence
  Description of Artificial Sequence: Synthetic oligonucleotide
  Target: COL7A1; (-) strand; PAM type: YTN; PAM sequence: CTA
gccctctaacccttgcagcc

SEQ ID NO: 28070 - DNA, 20 bp, Artificial Sequence
  Description of Artificial Sequence: Synthetic oligonucleotide
  Target: COL7A1; (-) strand; PAM type: YTN; PAM sequence: TTC
tagccctctaacccttgcag

SEQ ID NO: 28071 - DNA, 20 bp, Artificial Sequence
  Description of Artificial Sequence: Synthetic oligonucleotide
  Target: COL7A1; (-) strand; PAM type: YTN; PAM sequence: CTC
cacgttctagccctctaacc

SEQ ID NO: 28072 - DNA, 20 bp, Artificial Sequence
  Description of Artificial Sequence: Synthetic oligonucleotide
  Target: COL7A1; (-) strand; PAM type: YTN; PAM sequence: TTC
tccacgttctagccctctaa

SEQ ID NO: 28073 - DNA, 20 bp, Artificial Sequence
  Description of Artificial Sequence: Synthetic oligonucleotide
  Target: COL7A1; (-) strand; PAM type: YTN; PAM sequence: TTG
gattctccacgttctagccc

SEQ ID NO: 28074 - DNA, 20 bp, Artificial Sequence
  Description of Artificial Sequence: Synthetic oligonucleotide
  Target: COL7A1; (-) strand; PAM type: YTN; PAM sequence: CTG
ttggattctccacgttctag

SEQ ID NO: 28075 - DNA, 20 bp, Artificial Sequence
  Description of Artificial Sequence: Synthetic oligonucleotide
  Target: COL7A1; (-) strand; PAM type: YTN; PAM sequence: CTG
gagatggggagcccaggagg

SEQ ID NO: 28076 - DNA, 20 bp, Artificial Sequence
  Description of Artificial Sequence: Synthetic oligonucleotide
  Target: COL7A1; (-) strand; PAM type: YTN; PAM sequence: CTG
atctggagatggggagccca

SEQ ID NO: 28077 - DNA, 20 bp, Artificial Sequence
  Description of Artificial Sequence: Synthetic oligonucleotide
  Target: COL7A1; (-) strand; PAM type: YTN; PAM sequence: TTC
tgatctggagatggggagcc

SEQ ID NO: 28078 - DNA, 20 bp, Artificial Sequence
  Description of Artificial Sequence: Synthetic oligonucleotide
  Target: COL7A1; (-) strand; PAM type: YTN; PAM sequence: TTT
ctgatctggagatggggagc

SEQ ID NO: 28079 - DNA, 20 bp, Artificial Sequence
  Description of Artificial Sequence: Synthetic oligonucleotide
  Target: COL7A1; (-) strand; PAM type: YTN; PAM sequence: TTT
tctgatctggagatggggag

SEQ ID NO: 28080 - DNA, 20 bp, Artificial Sequence
  Description of Artificial Sequence: Synthetic oligonucleotide
  Target: COL7A1; (-) strand; PAM type: YTN; PAM sequence: CTG
tgttttctgatctggagatg

SEQ ID NO: 28081 - DNA, 20 bp, Artificial Sequence
  Description of Artificial Sequence: Synthetic oligonucleotide
  Target: COL7A1; (-) strand; PAM type: YTN; PAM sequence: CTG
caagacaggaaggtgcaaga

SEQ ID NO: 28082 - DNA, 20 bp, Artificial Sequence
  Description of Artificial Sequence: Synthetic oligonucleotide
  Target: COL7A1; (-) strand; PAM type: YTN; PAM sequence: CTA
ctgcaagacaggaaggtgca

SEQ ID NO: 28083 - DNA, 20 bp, Artificial Sequence
  Description of Artificial Sequence: Synthetic oligonucleotide
  Target: COL7A1; (-) strand; PAM type: YTN; PAM sequence: CTC
caggctactgcaagacagga

SEQ ID NO: 28084 - DNA, 20 bp, Artificial Sequence
  Description of Artificial Sequence: Synthetic oligonucleotide
  Target: COL7A1; (-) strand; PAM type: YTN; PAM sequence: CTG
aggcacctccaggctactgc

SEQ ID NO: 28085 - DNA, 20 bp, Artificial Sequence
  Description of Artificial Sequence: Synthetic oligonucleotide
  Target: COL7A1; (-) strand; PAM type: YTN; PAM sequence: TTC
gtgccctgaggcacctccag

SEQ ID NO: 28086 - DNA, 20 bp, Artificial Sequence
  Description of Artificial Sequence: Synthetic oligonucleotide
  Target: COL7A1; (-) strand; PAM type: YTN; PAM sequence: CTT
cgtgccctgaggcacctcca

SEQ ID NO: 28087 - DNA, 20 bp, Artificial Sequence
  Description of Artificial Sequence: Synthetic oligonucleotide
  Target: COL7A1; (-) strand; PAM type: YTN; PAM sequence: CTA
ggtagaaccttcgtgccctg

SEQ ID NO: 28088 - DNA, 20 bp, Artificial Sequence
  Description of Artificial Sequence: Synthetic oligonucleotide
  Target: COL7A1; (-) strand; PAM type: YTN; PAM sequence: TTC
cctaggtagaaccttcgtgc

SEQ ID NO: 28089 - DNA, 20 bp, Artificial Sequence
  Description of Artificial Sequence: Synthetic oligonucleotide
  Target: COL7A1; (-) strand; PAM type: YTN; PAM sequence: TTG
gagacagaggtaaggattcc

SEQ ID NO: 28090 - DNA, 20 bp, Artificial Sequence
  Description of Artificial Sequence: Synthetic oligonucleotide
  Target: COL7A1; (-) strand; PAM type: YTN; PAM sequence: TTT
ggagacagaggtaaggattc

SEQ ID NO: 28091 - DNA, 20 bp, Artificial Sequence
  Description of Artificial Sequence: Synthetic oligonucleotide
  Target: COL7A1; (-) strand; PAM type: YTN; PAM sequence: CTT
tggagacagaggtaaggatt

SEQ ID NO: 28092 - DNA, 20 bp, Artificial Sequence
  Description of Artificial Sequence: Synthetic oligonucleotide
  Target: COL7A1; (-) strand; PAM type: YTN; PAM sequence: CTC
ctttggagacagaggtaagg

SEQ ID NO: 28093 - DNA, 20 bp, Artificial Sequence
  Description of Artificial Sequence: Synthetic oligonucleotide
  Target: COL7A1; (-) strand; PAM type: YTN; PAM sequence: CTA
gccaggacctcctttggaga

SEQ ID NO: 28094 - DNA, 20 bp, Artificial Sequence
  Description of Artificial Sequence: Synthetic oligonucleotide
  Target: COL7A1; (-) strand; PAM type: YTN; PAM sequence: CTA
gagaccccctagccaggacc

SEQ ID NO: 28095 - DNA, 20 bp, Artificial Sequence
  Description of Artificial Sequence: Synthetic oligonucleotide
  Target: COL7A1; (-) strand; PAM type: YTN; PAM sequence: TTG
gggaacctagagacccccta

SEQ ID NO: 28096 - DNA, 20 bp, Artificial Sequence
  Description of Artificial Sequence: Synthetic oligonucleotide
  Target: COL7A1; (-) strand; PAM type: YTN; PAM sequence: TTT
ggggaacctagagaccccct

SEQ ID NO: 28097 - DNA, 20 bp, Artificial Sequence
  Description of Artificial Sequence: Synthetic oligonucleotide
  Target: COL7A1; (-) strand; PAM type: YTN; PAM sequence: TTT
tggggaacctagagaccccc

SEQ ID NO: 28098 - DNA, 20 bp, Artificial Sequence
  Description of Artificial Sequence: Synthetic oligonucleotide
  Target: COL7A1; (-) strand; PAM type: YTN; PAM sequence: TTG
cagaaacaagttttggggaa

SEQ ID NO: 28099 - DNA, 20 bp, Artificial Sequence
  Description of Artificial Sequence: Synthetic oligonucleotide
  Target: COL7A1; (-) strand; PAM type: YTN; PAM sequence: TTT
gcagaaacaagttttgggga

SEQ ID NO: 28100 - DNA, 20 bp, Artificial Sequence
  Description of Artificial Sequence: Synthetic oligonucleotide
  Target: COL7A1; (-) strand; PAM type: YTN; PAM sequence: CTT
tgcagaaacaagttttgggg

SEQ ID NO: 28101 - DNA, 20 bp, Artificial Sequence
  Description of Artificial Sequence: Synthetic oligonucleotide
  Target: COL7A1; (-) strand; PAM type: YTN; PAM sequence: CTG
gaaaccccaggccaggtctt

SEQ ID NO: 28102 - DNA, 20 bp, Artificial Sequence
  Description of Artificial Sequence: Synthetic oligonucleotide
  Target: COL7A1; (-) strand; PAM type: YTN; PAM sequence: TTC
cccagagagggaggagaccc

SEQ ID NO: 28103 - DNA, 20 bp, Artificial Sequence
  Description of Artificial Sequence: Synthetic oligonucleotide
  Target: COL7A1; (-) strand; PAM type: YTN; PAM sequence: CTT
ccccagagagggaggagacc

SEQ ID NO: 28104 - DNA, 20 bp, Artificial Sequence
  Description of Artificial Sequence: Synthetic oligonucleotide
  Target: COL7A1; (-) strand; PAM type: YTN; PAM sequence: CTC
cttccccagagagggaggag

SEQ ID NO: 28105 - DNA, 20 bp, Artificial Sequence
  Description of Artificial Sequence: Synthetic oligonucleotide
  Target: COL7A1; (-) strand; PAM type: YTN; PAM sequence: CTG
gggaccacgagatccccacc

SEQ ID NO: 28106 - DNA, 20 bp, Artificial Sequence
  Description of Artificial Sequence: Synthetic oligonucleotide
  Target: COL7A1; (-) strand; PAM type: YTN; PAM sequence: CTG
ggggctggggaccacgagat

SEQ ID NO: 28107 - DNA, 20 bp, Artificial Sequence
  Description of Artificial Sequence: Synthetic oligonucleotide
  Target: COL7A1; (-) strand; PAM type: YTN; PAM sequence: TTG
ccacagtgcagtacagcgat

SEQ ID NO: 28108 - DNA, 20 bp, Artificial Sequence
  Description of Artificial Sequence: Synthetic oligonucleotide
  Target: COL7A1; (-) strand; PAM type: YTN; PAM sequence: TTT
gccacagtgcagtacagcga

SEQ ID NO: 28109 - DNA, 20 bp, Artificial Sequence
  Description of Artificial Sequence: Synthetic oligonucleotide
  Target: COL7A1; (-) strand; PAM type: YTN; PAM sequence: CTT
tgccacagtgcagtacagcg

SEQ ID NO: 28110 - DNA, 20 bp, Artificial Sequence
  Description of Artificial Sequence: Synthetic oligonucleotide
  Target: COL7A1; (-) strand; PAM type: YTN; PAM sequence: CTG
gagcagccagtgcacagggt

SEQ ID NO: 28111 - DNA, 20 bp, Artificial Sequence
  Description of Artificial Sequence: Synthetic oligonucleotide
  Target: COL7A1; (-) strand; PAM type: YTN; PAM sequence: CTC
tggagcagccagtgcacagg

SEQ ID NO: 28112 - DNA, 20 bp, Artificial Sequence
  Description of Artificial Sequence: Synthetic oligonucleotide
  Target: COL7A1; (-) strand; PAM type: YTN; PAM sequence: TTC
tctggagcagccagtgcaca

SEQ ID NO: 28113 - DNA, 20 bp, Artificial Sequence
  Description of Artificial Sequence: Synthetic oligonucleotide
  Target: COL7A1; (-) strand; PAM type: YTN; PAM sequence: TTT
ctctggagcagccagtgcac

SEQ ID NO: 28114 - DNA, 20 bp, Artificial Sequence
  Description of Artificial Sequence: Synthetic oligonucleotide
  Target: COL7A1; (-) strand; PAM type: YTN; PAM sequence: CTT
tctctggagcagccagtgca

SEQ ID NO: 28115 - DNA, 20 bp, Artificial Sequence
  Description of Artificial Sequence: Synthetic oligonucleotide
  Target: COL7A1; (-) strand; PAM type: YTN; PAM sequence: CTG
cctttctctggagcagccag

SEQ ID NO: 28116 - DNA, 20 bp, Artificial Sequence
  Description of Artificial Sequence: Synthetic oligonucleotide
  Target: COL7A1; (-) strand; PAM type: YTN; PAM sequence: CTG
gtgctgcctttctctggagc

SEQ ID NO: 28117 - DNA, 20 bp, Artificial Sequence
  Description of Artificial Sequence: Synthetic oligonucleotide
  Target: COL7A1; (-) strand; PAM type: YTN; PAM sequence: CTC
gaagggctggtgctgccttt

SEQ ID NO: 28118 - DNA, 20 bp, Artificial Sequence
  Description of Artificial Sequence: Synthetic oligonucleotide
  Target: COL7A1; (-) strand; PAM type: YTN; PAM sequence: TTC
tcgaagggctggtgctgcct

SEQ ID NO: 28119 - DNA, 20 bp, Artificial Sequence
  Description of Artificial Sequence: Synthetic oligonucleotide
  Target: COL7A1; (-) strand; PAM type: YTN; PAM sequence: TTT
ctcgaagggctggtgctgcc

SEQ ID NO: 28120 - DNA, 20 bp, Artificial Sequence
  Description of Artificial Sequence: Synthetic oligonucleotide
  Target: COL7A1; (-) strand; PAM type: YTN; PAM sequence: CTT
tctcgaagggctggtgctgc

SEQ ID NO: 28121 - DNA, 20 bp, Artificial Sequence
  Description of Artificial Sequence: Synthetic oligonucleotide
  Target: COL7A1; (-) strand; PAM type: YTN; PAM sequence: TTC
cgcgaggtccgcagctttct

SEQ ID NO: 28122 - DNA, 20 bp, Artificial Sequence
  Description of Artificial Sequence: Synthetic oligonucleotide
  Target: COL7A1; (-) strand; PAM type: YTN; PAM sequence: TTT
ccgcgaggtccgcagctttc

SEQ ID NO: 28123 - DNA, 20 bp, Artificial Sequence
  Description of Artificial Sequence: Synthetic oligonucleotide
  Target: COL7A1; (-) strand; PAM type: YTN; PAM sequence: TTG
gccgcagcaatttccgcgag

SEQ ID NO: 28124 - DNA, 20 bp, Artificial Sequence
  Description of Artificial Sequence: Synthetic oligonucleotide
  Target: COL7A1; (-) strand; PAM type: YTN; PAM sequence: CTC
atccattggccgcagcaatt

SEQ ID NO: 28125 - DNA, 20 bp, Artificial Sequence
  Description of Artificial Sequence: Synthetic oligonucleotide
  Target: COL7A1; (-) strand; PAM type: YTN; PAM sequence: CTC
ctcatccattggccgcagca

SEQ ID NO: 28126 - DNA, 20 bp, Artificial Sequence
  Description of Artificial Sequence: Synthetic oligonucleotide
  Target: COL7A1; (-) strand; PAM type: YTN; PAM sequence: CTG
gatggctcctcatccattgg

SEQ ID NO: 28127 - DNA, 20 bp, Artificial Sequence
  Description of Artificial Sequence: Synthetic oligonucleotide
  Target: COL7A1; (-) strand; PAM type: YTN; PAM sequence: TTA
ctggatggctcctcatccat

SEQ ID NO: 28128 - DNA, 20 bp, Artificial Sequence
  Description of Artificial Sequence: Synthetic oligonucleotide
  Target: COL7A1; (-) strand; PAM type: YTN; PAM sequence: CTT
actggatggctcctcatcca

SEQ ID NO: 28129 - DNA, 20 bp, Artificial Sequence
  Description of Artificial Sequence: Synthetic oligonucleotide
  Target: COL7A1; (-) strand; PAM type: YTN; PAM sequence: TTC
ttactggatggctcctcatc

SEQ ID NO: 28130 - DNA, 20 bp, Artificial Sequence
  Description of Artificial Sequence: Synthetic oligonucleotide
  Target: COL7A1; (-) strand; PAM type: YTN; PAM sequence: TTG
tgttcttactggatggctcc

SEQ ID NO: 28131 - DNA, 20 bp, Artificial Sequence
  Description of Artificial Sequence: Synthetic oligonucleotide
  Target: COL7A1; (-) strand; PAM type: YTN; PAM sequence: CTG
acattgtgttcttactggat

SEQ ID NO: 28132 - DNA, 20 bp, Artificial Sequence
  Description of Artificial Sequence: Synthetic oligonucleotide
  Target: COL7A1; (-) strand; PAM type: YTN; PAM sequence: TTA
cgccgctgacattgtgttct

SEQ ID NO: 28133 - DNA, 20 bp, Artificial Sequence
  Description of Artificial Sequence: Synthetic oligonucleotide
  Target: COL7A1; (-) strand; PAM type: YTN; PAM sequence: TTT
acgccgctgacattgtgttc

SEQ ID NO: 28134 - DNA, 20 bp, Artificial Sequence
  Description of Artificial Sequence: Synthetic oligonucleotide
  Target: COL7A1; (-) strand; PAM type: YTN; PAM sequence: CTT
tacgccgctgacattgtgtt

SEQ ID NO: 28135 - DNA, 20 bp, Artificial Sequence
  Description of Artificial Sequence: Synthetic oligonucleotide
  Target: COL7A1; (-) strand; PAM type: YTN; PAM sequence: CTG
cacgcgcctttacgccgctg

SEQ ID NO: 28136 - DNA, 20 bp, Artificial Sequence
  Description of Artificial Sequence: Synthetic oligonucleotide
  Target: COL7A1; (-) strand; PAM type: YTN; PAM sequence: CTG
cccgccccagtgacctgcac

SEQ ID NO: 28137 - DNA, 20 bp, Artificial Sequence
  Description of Artificial Sequence: Synthetic oligonucleotide
  Target: COL7A1; (-) strand; PAM type: YTN; PAM sequence: CTC
ctgcccgccccagtgacctg

SEQ ID NO: 28138 - DNA, 20 bp, Artificial Sequence
  Description of Artificial Sequence: Synthetic oligonucleotide
  Target: COL7A1; (-) strand; PAM type: YTN; PAM sequence: CTC
tcctgcccgccccagtgacc

SEQ ID NO: 28139 - DNA, 20 bp, Artificial Sequence
  Description of Artificial Sequence: Synthetic oligonucleotide
  Target: COL7A1; (-) strand; PAM type: YTN; PAM sequence: CTG
atctctcctgcccgccccag

SEQ ID NO: 28140 - DNA, 20 bp, Artificial Sequence
  Description of Artificial Sequence: Synthetic oligonucleotide
  Target: COL7A1; (-) strand; PAM type: YTN; PAM sequence: CTC
ccagaagaggccctgatctc

SEQ ID NO: 28141 - DNA, 20 bp, Artificial Sequence
  Description of Artificial Sequence: Synthetic oligonucleotide
  Target: COL7A1; (-) strand; PAM type: YTN; PAM sequence: TTG
gcctcccagaagaggccctg

SEQ ID NO: 28142 - DNA, 20 bp, Artificial Sequence
  Description of Artificial Sequence: Synthetic oligonucleotide
  Target: COL7A1; (-) strand; PAM type: YTN; PAM sequence: CTC
cccaccatcccaagtcccag

SEQ ID NO: 28143 - DNA, 20 bp, Artificial Sequence
  Description of Artificial Sequence: Synthetic oligonucleotide
  Target: COL7A1; (-) strand; PAM type: YTN; PAM sequence: CTC
tccccaccatcccaagtccc

SEQ ID NO: 28144 - DNA, 20 bp, Artificial Sequence
  Description of Artificial Sequence: Synthetic oligonucleotide
  Target: COL7A1; (-) strand; PAM type: YTN; PAM sequence: CTA
ctctccccaccatcccaagt

SEQ ID NO: 28145 - DNA, 20 bp, Artificial Sequence
  Description of Artificial Sequence: Synthetic oligonucleotide
  Target: COL7A1; (-) strand; PAM type: YTN; PAM sequence: TTG
cataagatgaggcctactct

SEQ ID NO: 28146 - DNA, 20 bp, Artificial Sequence
  Description of Artificial Sequence: Synthetic oligonucleotide
  Target: COL7A1; (-) strand; PAM type: YTN; PAM sequence: TTT
gcataagatgaggcctactc

SEQ ID NO: 28147 - DNA, 20 bp, Artificial Sequence
  Description of Artificial Sequence: Synthetic oligonucleotide
  Target: COL7A1; (-) strand; PAM type: YTN; PAM sequence: CTG
gtttgcataagatgaggcct

SEQ ID NO: 28148 - DNA, 20 bp, Artificial Sequence
  Description of Artificial Sequence: Synthetic oligonucleotide
  Target: COL7A1; (-) strand; PAM type: YTN; PAM sequence: TTC
ggccctggtttgcataagat

SEQ ID NO: 28149 - DNA, 20 bp, Artificial Sequence
  Description of Artificial Sequence: Synthetic oligonucleotide
  Target: COL7A1; (-) strand; PAM type: YTN; PAM sequence: CTC
aggccgattcggccctggtt

SEQ ID NO: 28150 - DNA, 20 bp, Artificial Sequence
  Description of Artificial Sequence: Synthetic oligonucleotide
  Target: COL7A1; (-) strand; PAM type: YTN; PAM sequence: CTC
aggctcaggccgattcggcc

SEQ ID NO: 28151 - DNA, 20 bp, Artificial Sequence
  Description of Artificial Sequence: Synthetic oligonucleotide
  Target: COL7A1; (-) strand; PAM type: YTN; PAM sequence: CTC
caaggccctcaggctcaggc

SEQ ID NO: 28152 - DNA, 20 bp, Artificial Sequence
  Description of Artificial Sequence: Synthetic oligonucleotide
  Target: COL7A1; (-) strand; PAM type: YTN; PAM sequence: CTC
cctccaaggccctcaggctc

SEQ ID NO: 28153 - DNA, 20 bp, Artificial Sequence
  Description of Artificial Sequence: Synthetic oligonucleotide
  Target: COL7A1; (-) strand; PAM type: YTN; PAM sequence: CTC
aactccctccaaggccctca

SEQ ID NO: 28154 - DNA, 20 bp, Artificial Sequence
  Description of Artificial Sequence: Synthetic oligonucleotide
  Target: COL7A1; (-) strand; PAM type: YTN; PAM sequence: CTG
ggacccaccgagctcaactc

SEQ ID NO: 28155 - DNA, 20 bp, Artificial Sequence
  Description of Artificial Sequence: Synthetic oligonucleotide
  Target: COL7A1; (-) strand; PAM type: YTN; PAM sequence: CTC
tgggacccaccgagctcaac

SEQ ID NO: 28156 - DNA, 20 bp, Artificial Sequence
  Description of Artificial Sequence: Synthetic oligonucleotide
  Target: COL7A1; (-) strand; PAM type: YTN; PAM sequence: CTG
ctctgggacccaccgagctc

SEQ ID NO: 28157 - DNA, 20 bp, Artificial Sequence
  Description of Artificial Sequence: Synthetic oligonucleotide
  Target: COL7A1; (-) strand; PAM type: YTN; PAM sequence: CTC
cgcgggagtctgctctggga

SEQ ID NO: 28158 - DNA, 20 bp, Artificial Sequence
  Description of Artificial Sequence: Synthetic oligonucleotide
  Target: COL7A1; (-) strand; PAM type: YTN; PAM sequence: CTC
ccccgcacacccccaaccct

SEQ ID NO: 28159 - DNA, 20 bp, Artificial Sequence
  Description of Artificial Sequence: Synthetic oligonucleotide
  Target: COL7A1; (-) strand; PAM type: YTN; PAM sequence: CTC
cctcccccgcacacccccaa

SEQ ID NO: 28160 - DNA, 20 bp, Artificial Sequence
  Description of Artificial Sequence: Synthetic oligonucleotide
  Target: COL7A1; (-) strand; PAM type: YTN; PAM sequence: CTC
tccctcccccgcacaccccc

SEQ ID NO: 28161 - DNA, 20 bp, Artificial Sequence
  Description of Artificial Sequence: Synthetic oligonucleotide
  Target: COL7A1; (-) strand; PAM type: YTN; PAM sequence: CTG
gcgactctccctcccccgca

SEQ ID NO: 28162 - DNA, 20 bp, Artificial Sequence
  Description of Artificial Sequence: Synthetic oligonucleotide
  Target: COL7A1; (-) strand; PAM type: YTN; PAM sequence: CTC
agtcccaagtccacacccgt

SEQ ID NO: 28163 - DNA, 20 bp, Artificial Sequence
  Description of Artificial Sequence: Synthetic oligonucleotide
  Target: COL7A1; (-) strand; PAM type: YTN; PAM sequence: CTG
acctcagtcccaagtccaca

SEQ ID NO: 28164 - DNA, 20 bp, Artificial Sequence
  Description of Artificial Sequence: Synthetic oligonucleotide
  Target: COL7A1; (-) strand; PAM type: YTN; PAM sequence: CTA
gaggctgacctcagtcccaa

SEQ ID NO: 28165 - DNA, 20 bp, Artificial Sequence
  Description of Artificial Sequence: Synthetic oligonucleotide
  Target: COL7A1; (-) strand; PAM type: YTN; PAM sequence: TTA
tgccaatccacgccggcccc

SEQ ID NO: 28166 - DNA, 20 bp, Artificial Sequence
  Description of Artificial Sequence: Synthetic oligonucleotide
  Target: COL7A1; (-) strand; PAM type: YTN; PAM sequence: CTT
atgccaatccacgccggccc

SEQ ID NO: 28167 - DNA, 20 bp, Artificial Sequence
  Description of Artificial Sequence: Synthetic oligonucleotide
  Target: COL7A1; (-) strand; PAM type: YTN; PAM sequence: CTG
ccttatgccaatccacgccg

SEQ ID NO: 28168 - DNA, 20 bp, Artificial Sequence
  Description of Artificial Sequence: Synthetic oligonucleotide
  Target: COL7A1; (-) strand; PAM type: YTN; PAM sequence: CTG
gatgcgtgcggggtcccctg

SEQ ID NO: 28169 - DNA, 20 bp, Artificial Sequence
  Description of Artificial Sequence: Synthetic oligonucleotide
  Target: COL7A1; (-) strand; PAM type: YTN; PAM sequence: CTC
cctggatgcgtgcggggtcc

SEQ ID NO: 28170 - DNA, 20 bp, Artificial Sequence
  Description of Artificial Sequence: Synthetic oligonucleotide
  Target: COL7A1; (-) strand; PAM type: YTN; PAM sequence: CTG
gctccctggatgcgtgcggg

SEQ ID NO: 28171 - DNA, 20 bp, Artificial Sequence
  Description of Artificial Sequence: Synthetic oligonucleotide
  Target: COL7A1; (-) strand; PAM type: YTN; PAM sequence: TTC
tggctccctggatgcgtgcg

SEQ ID NO: 28172 - DNA, 20 bp, Artificial Sequence
  Description of Artificial Sequence: Synthetic oligonucleotide
  Target: COL7A1; (-) strand; PAM type: YTN; PAM sequence: CTA
cccaaattctggctccctgg

SEQ ID NO: 28173 - DNA, 20 bp, Artificial Sequence
  Description of Artificial Sequence: Synthetic oligonucleotide
  Target: COL7A1; (-) strand; PAM type: YTN; PAM sequence: TTC
ctacccaaattctggctccc

SEQ ID NO: 28174 - DNA, 20 bp, Artificial Sequence
  Description of Artificial Sequence: Synthetic oligonucleotide
  Target: COL7A1; (-) strand; PAM type: YTN; PAM sequence: CTG
ttcctacccaaattctggct

SEQ ID NO: 28175 - DNA, 20 bp, Artificial Sequence
  Description of Artificial Sequence: Synthetic oligonucleotide
  Target: COL7A1; (-) strand; PAM type: YTN; PAM sequence: CTA
tcctgttcctacccaaattc

SEQ ID NO: 28176 - DNA, 20 bp, Artificial Sequence
  Description of Artificial Sequence: Synthetic oligonucleotide
  Target: COL7A1; (-) strand; PAM type: YTN; PAM sequence: CTC
ctatcctgttcctacccaaa

SEQ ID NO: 28177 - DNA, 20 bp, Artificial Sequence
  Description of Artificial Sequence: Synthetic oligonucleotide
  Target: COL7A1; (-) strand; PAM type: YTN; PAM sequence: CTA
aaccgcctcctatcctgttc

SEQ ID NO: 28178 - DNA, 20 bp, Artificial Sequence
  Description of Artificial Sequence: Synthetic oligonucleotide
  Target: COL7A1; (-) strand; PAM type: YTN; PAM sequence: TTC
cctaaaccgcctcctatcct

SEQ ID NO: 28179 - DNA, 20 bp, Artificial Sequence
  Description of Artificial Sequence: Synthetic oligonucleotide
  Target: COL7A1; (-) strand; PAM type: YTN; PAM sequence: CTG
ggttccctaaaccgcctcct

SEQ ID NO: 28180 - DNA, 20 bp, Artificial Sequence
  Description of Artificial Sequence: Synthetic oligonucleotide
  Target: COL7A1; (-) strand; PAM type: YTN; PAM sequence: CTC
cgcgatcggtgctgggttcc

SEQ ID NO: 28181 - DNA, 20 bp, Artificial Sequence
  Description of Artificial Sequence: Synthetic oligonucleotide
  Target: COL7A1; (-) strand; PAM type: YTN; PAM sequence: CTC
cccgaaccctccgcgatcgg

SEQ ID NO: 28182 - DNA, 20 bp, Artificial Sequence
  Description of Artificial Sequence: Synthetic oligonucleotide
  Target: COL7A1; (-) strand; PAM type: YTN; PAM sequence: CTG
ggactccccgaaccctccgc

SEQ ID NO: 28183 - DNA, 20 bp, Artificial Sequence
  Description of Artificial Sequence: Synthetic oligonucleotide
  Target: COL7A1; (-) strand; PAM type: YTN; PAM sequence: TTC
tgggactccccgaaccctcc

SEQ ID NO: 28184 - DNA, 20 bp, Artificial Sequence
  Description of Artificial Sequence: Synthetic oligonucleotide
  Target: COL7A1; (-) strand; PAM type: YTN; PAM sequence: CTA
attctgggactccccgaacc

SEQ ID NO: 28185 - DNA, 20 bp, Artificial Sequence
  Description of Artificial Sequence: Synthetic oligonucleotide
  Target: COL7A1; (-) strand; PAM type: YTN; PAM sequence: CTC
ctaattctgggactccccga

SEQ ID NO: 28186 - DNA, 20 bp, Artificial Sequence
  Description of Artificial Sequence: Synthetic oligonucleotide
  Target: COL7A1; (-) strand; PAM type: YTN; PAM sequence: TTC
ctcctaattctgggactccc

SEQ ID NO: 28187 - DNA, 20 bp, Artificial Sequence
  Description of Artificial Sequence: Synthetic oligonucleotide
  Target: COL7A1; (-) strand; PAM type: YTN; PAM sequence: CTC
cacgacgccccgcggattcc

SEQ ID NO: 28188 - DNA, 20 bp, Artificial Sequence
  Description of Artificial Sequence: Synthetic oligonucleotide
  Target: COL7A1; (-) strand; PAM type: YTN; PAM sequence: TTC
atccccaacaccccccgccc

SEQ ID NO: 28189 - DNA, 20 bp, Artificial Sequence
  Description of Artificial Sequence: Synthetic oligonucleotide
  Target: COL7A1; (-) strand; PAM type: YTN; PAM sequence: CTT
catccccaacaccccccgcc

SEQ ID NO: 28190 - DNA, 20 bp, Artificial Sequence
  Description of Artificial Sequence: Synthetic oligonucleotide
  Target: COL7A1; (-) strand; PAM type: YTN; PAM sequence: CTC
ggccttcatccccaacaccc

SEQ ID NO: 28191 - DNA, 20 bp, Artificial Sequence
  Description of Artificial Sequence: Synthetic oligonucleotide
  Target: COL7A1; (-) strand; PAM type: YTN; PAM sequence: CTC
cactcggccttcatccccaa

SEQ ID NO: 28192 - DNA, 20 bp, Artificial Sequence
  Description of Artificial Sequence: Synthetic oligonucleotide
  Target: COL7A1; (-) strand; PAM type: YTN; PAM sequence: CTC
cgctccactcggccttcatc

SEQ ID NO: 28193 - DNA, 20 bp, Artificial Sequence
  Description of Artificial Sequence: Synthetic oligonucleotide
  Target: COL7A1; (-) strand; PAM type: YTN; PAM sequence: CTG
caccgtgccaccctccgctc

SEQ ID NO: 28194 - DNA, 20 bp, Artificial Sequence
  Description of Artificial Sequence: Synthetic oligonucleotide
  Target: COL7A1; (-) strand; PAM type: YTN; PAM sequence: CTG
gcagaggcgccccgagtgcg

SEQ ID NO: 28195 - DNA, 20 bp, Artificial Sequence
  Description of Artificial Sequence: Synthetic oligonucleotide
  Target: COL7A1; (-) strand; PAM type: YTN; PAM sequence: CTG
cgccgggatcctggcagagg

SEQ ID NO: 28196 - DNA, 20 bp, Artificial Sequence
  Description of Artificial Sequence: Synthetic oligonucleotide
  Target: COL7A1; (-) strand; PAM type: YTN; PAM sequence: CTC
tgcgccgggatcctggcaga

SEQ ID NO: 28197 - DNA, 20 bp, Artificial Sequence
  Description of Artificial Sequence: Synthetic oligonucleotide
  Target: COL7A1; (-) strand; PAM type: YTN; PAM sequence: CTG
gtggccgcgctctgcgccgg

SEQ ID NO: 28198 - DNA, 20 bp, Artificial Sequence
  Description of Artificial Sequence: Synthetic oligonucleotide
  Target: COL7A1; (-) strand; PAM type: YTN; PAM sequence: TTC
tggtggccgcgctctgcgcc

SEQ ID NO: 28199 - DNA, 20 bp, Artificial Sequence
  Description of Artificial Sequence: Synthetic oligonucleotide
  Target: COL7A1; (-) strand; PAM type: YTN; PAM sequence: CTT
ctggtggccgcgctctgcgc

SEQ ID NO: 28200 - DNA, 20 bp, Artificial Sequence
  Description of Artificial Sequence: Synthetic oligonucleotide
  Target: COL7A1; (-) strand; PAM type: YTN; PAM sequence: CTG
cggcttctggtggccgcgct

SEQ ID NO: 28201 - DNA, 20 bp, Artificial Sequence
  Description of Artificial Sequence: Synthetic oligonucleotide
  Target: COL7A1; (-) strand; PAM type: YTN; PAM sequence: CTA
ggatgacgctgcggcttctg

SEQ ID NO: 28202 - DNA, 20 bp, Artificial Sequence
  Description of Artificial Sequence: Synthetic oligonucleotide
  Target: COL7A1; (-) strand; PAM type: YTN; PAM sequence: CTG
cctaggatgacgctgcggct

SEQ ID NO: 28203 - DNA, 20 bp, Artificial Sequence
  Description of Artificial Sequence: Synthetic oligonucleotide
  Target: COL7A1; (-) strand; PAM type: YTN; PAM sequence: TTA
ctgcctaggatgacgctgcg

SEQ ID NO: 28204 - DNA, 20 bp, Artificial Sequence
  Description of Artificial Sequence: Synthetic oligonucleotide
  Target: COL7A1; (-) strand; PAM type: YTN; PAM sequence: TTT
actgcctaggatgacgctgc

SEQ ID NO: 28205 - DNA, 20 bp, Artificial Sequence
  Description of Artificial Sequence: Synthetic oligonucleotide
  Target: COL7A1; (-) strand; PAM type: YTN; PAM sequence: TTT
tactgcctaggatgacgctg

SEQ ID NO: 28206 - DNA, 20 bp, Artificial Sequence
  Description of Artificial Sequence: Synthetic oligonucleotide
  Target: COL7A1; (-) strand; PAM type: YTN; PAM sequence: CTT
ttactgcctaggatgacgct

SEQ ID NO: 28207 - DNA, 20 bp, Artificial Sequence
  Description of Artificial Sequence: Synthetic oligonucleotide
  Target: COL7A1; (-) strand; PAM type: YTN; PAM sequence: CTG
acggcttttactgcctagga

SEQ ID NO: 28208 - DNA, 20 bp, Artificial Sequence
  Description of Artificial Sequence: Synthetic oligonucleotide
  Target: COL7A1; (-) strand; PAM type: YTN; PAM sequence: CTA
gctgacggcttttactgcct

SEQ ID NO: 28209 - DNA, 20 bp, Artificial Sequence
  Description of Artificial Sequence: Synthetic oligonucleotide
  Target: COL7A1; (-) strand; PAM type: YTN; PAM sequence: CTG
ccaaggccacgggggagcaa

SEQ ID NO: 28210 - DNA, 20 bp, Artificial Sequence
  Description of Artificial Sequence: Synthetic oligonucleotide
  Target: COL7A1; (-) strand; PAM type: YTN; PAM sequence: CTC
ggacctgccaaggccacggg

SEQ ID NO: 28211 - DNA, 20 bp, Artificial Sequence
  Description of Artificial Sequence: Synthetic oligonucleotide
  Target: COL7A1; (-) strand; PAM type: YTN; PAM sequence: CTG
ggctcggacctgccaaggcc

SEQ ID NO: 28212 - DNA, 20 bp, Artificial Sequence
  Description of Artificial Sequence: Synthetic oligonucleotide
  Target: COL7A1; (-) strand; PAM type: YTN; PAM sequence: CTG
gaggggcgctgggctcggac

SEQ ID NO: 28213 - DNA, 20 bp, Artificial Sequence
  Description of Artificial Sequence: Synthetic oligonucleotide
  Target: COL7A1; (-) strand; PAM type: YTN; PAM sequence: CTC
gggctggaggggcgctgggc

SEQ ID NO: 28214 - DNA, 20 bp, Artificial Sequence
  Description of Artificial Sequence: Synthetic oligonucleotide
  Target: COL7A1; (-) strand; PAM type: YTN; PAM sequence: CTG
cagcggcggcggcgggagcg

SEQ ID NO: 28215 - DNA, 20 bp, Artificial Sequence
  Description of Artificial Sequence: Synthetic oligonucleotide
  Target: COL7A1; (-) strand; PAM type: YTN; PAM sequence: CTG
cccgagagactgcagcggcg

SEQ ID NO: 28216 - DNA, 20 bp, Artificial Sequence
  Description of Artificial Sequence: Synthetic oligonucleotide
  Target: COL7A1; (-) strand; PAM type: YTN; PAM sequence: CTC
tgcccgagagactgcagcgg

SEQ ID NO: 28217 - DNA, 20 bp, Artificial Sequence
  Description of Artificial Sequence: Synthetic oligonucleotide
  Target: COL7A1; (-) strand; PAM type: YTN; PAM sequence: CTG
ctctgcccgagagactgcag

SEQ ID NO: 28218 - DNA, 20 bp, Artificial Sequence
  Description of Artificial Sequence: Synthetic oligonucleotide
  Target: COL7A1; (-) strand; PAM type: YTN; PAM sequence: CTC
tgctctgcccgagagactgc

SEQ ID NO: 28219 - DNA, 20 bp, Artificial Sequence
  Description of Artificial Sequence: Synthetic oligonucleotide
  Target: COL7A1; (-) strand; PAM type: YTN; PAM sequence: TTC
tctgctctgcccgagagact

SEQ ID NO: 28220 - DNA, 20 bp, Artificial Sequence
  Description of Artificial Sequence: Synthetic oligonucleotide
  Target: COL7A1; (-) strand; PAM type: YTN; PAM sequence: TTT
ctctgctctgcccgagagac

SEQ ID NO: 28221 - DNA, 20 bp, Artificial Sequence
  Description of Artificial Sequence: Synthetic oligonucleotide
  Target: COL7A1; (-) strand; PAM type: YTN; PAM sequence: TTT
tctctgctctgcccgagaga

SEQ ID NO: 28222 - DNA, 20 bp, Artificial Sequence
  Description of Artificial Sequence: Synthetic oligonucleotide
  Target: COL7A1; (-) strand; PAM type: YTN; PAM sequence: CTT
ttctctgctctgcccgagag

SEQ ID NO: 28223 - DNA, 20 bp, Artificial Sequence
  Description of Artificial Sequence: Synthetic oligonucleotide
  Target: COL7A1; (-) strand; PAM type: YTN; PAM sequence: CTC
cgccccccgagatcagggac

SEQ ID NO: 28224 - DNA, 20 bp, Artificial Sequence
  Description of Artificial Sequence: Synthetic oligonucleotide
  Target: COL7A1; (-) strand; PAM type: YTN; PAM sequence: CTG
ccgctccgccccccgagatc

SEQ ID NO: 28225 - DNA, 20 bp, Artificial Sequence
  Description of Artificial Sequence: Synthetic oligonucleotide
  Target: COL7A1; (-) strand; PAM type: YTN; PAM sequence: TTC
ccgcctgccgctccgccccc

SEQ ID NO: 28226 - DNA, 20 bp, Artificial Sequence
  Description of Artificial Sequence: Synthetic oligonucleotide
  Target: COL7A1; (-) strand; PAM type: YTN; PAM sequence: CTG
ggttcccgcctgccgctccg

SEQ ID NO: 28227 - DNA, 20 bp, Artificial Sequence
  Description of Artificial Sequence: Synthetic oligonucleotide
  Target: COL7A1; (-) strand; PAM type: YTN; PAM sequence: CTC
agggatatgggtgagggcgg

SEQ ID NO: 28228 - DNA, 20 bp, Artificial Sequence
  Description of Artificial Sequence: Synthetic oligonucleotide
  Target: COL7A1; (-) strand; PAM type: YTN; PAM sequence: CTC
tcagggatatgggtgagggc

SEQ ID NO: 28229 - DNA, 20 bp, Artificial Sequence
  Description of Artificial Sequence: Synthetic oligonucleotide
  Target: COL7A1; (-) strand; PAM type: YTN; PAM sequence: CTG
ggggaggggtggggggggcg

SEQ ID NO: 28230 - DNA, 20 bp, Artificial Sequence
  Description of Artificial Sequence: Synthetic oligonucleotide
  Target: COL7A1; (-) strand; PAM type: YTN; PAM sequence: TTG
tctgggggaggggtgggggg

SEQ ID NO: 28231 - DNA, 20 bp, Artificial Sequence
  Description of Artificial Sequence: Synthetic oligonucleotide
  Target: COL7A1; (-) strand; PAM type: YTN; PAM sequence: TTT
gtctgggggaggggtggggg

SEQ ID NO: 28232 - DNA, 20 bp, Artificial Sequence
  Description of Artificial Sequence: Synthetic oligonucleotide
  Target: COL7A1; (-) strand; PAM type: YTN; PAM sequence: TTA
agtgcgtcatatcgtttgtc

SEQ ID NO: 28233 - DNA, 20 bp, Artificial Sequence
  Description of Artificial Sequence: Synthetic oligonucleotide
  Target: COL7A1; (-) strand; PAM type: YTN; PAM sequence: TTA
tagttaagtgcgtcatatcg

SEQ ID NO: 28234 - DNA, 20 bp, Artificial Sequence
  Description of Artificial Sequence: Synthetic oligonucleotide
  Target: COL7A1; (-) strand; PAM type: YTN; PAM sequence: TTT
atagttaagtgcgtcatatc

SEQ ID NO: 28235 - DNA, 20 bp, Artificial Sequence
  Description of Artificial Sequence: Synthetic oligonucleotide
  Target: COL7A1; (-) strand; PAM type: YTN; PAM sequence: TTC
ccagaagccacggggggtcg

SEQ ID NO: 28236 - DNA, 20 bp, Artificial Sequence
  Description of Artificial Sequence: Synthetic oligonucleotide
  Target: COL7A1; (-) strand; PAM type: YTN; PAM sequence: CTG
ggaaattcccagaagccacg

SEQ ID NO: 28237 - DNA, 20 bp, Artificial Sequence
  Description of Artificial Sequence: Synthetic oligonucleotide
  Target: COL7A1; (-) strand; PAM type: YTN; PAM sequence: TTC
tgggaaattcccagaagcca

SEQ ID NO: 28238 - DNA, 20 bp, Artificial Sequence
  Description of Artificial Sequence: Synthetic oligonucleotide
  Target: COL7A1; (-) strand; PAM type: YTN; PAM sequence: CTT
ctgggaaattcccagaagcc

SEQ ID NO: 28239 - DNA, 20 bp, Artificial Sequence
  Description of Artificial Sequence: Synthetic oligonucleotide
  Target: COL7A1; (-) strand; PAM type: YTN; PAM sequence: CTG
cccatgcagaaccttctggg

SEQ ID NO: 28240 - DNA, 20 bp, Artificial Sequence
  Description of Artificial Sequence: Synthetic oligonucleotide
  Target: COL7A1; (-) strand; PAM type: YTN; PAM sequence: CTC
agcatctgcccatgcagaac

SEQ ID NO: 28241 - DNA, 20 bp, Artificial Sequence
  Description of Artificial Sequence: Synthetic oligonucleotide
  Target: COL7A1; (-) strand; PAM type: YTN; PAM sequence: CTC
cctcagcatctgcccatgca

SEQ ID NO: 28242 - DNA, 20 bp, Artificial Sequence
  Description of Artificial Sequence: Synthetic oligonucleotide
  Target: COL7A1; (-) strand; PAM type: YTN; PAM sequence: TTA
ggggtactccctcagcatct

SEQ ID NO: 28243 - DNA, 20 bp, Artificial Sequence
  Description of Artificial Sequence: Synthetic oligonucleotide
  Target: COL7A1; (-) strand; PAM type: YTN; PAM sequence: TTA
gatggagttaggggtactcc

SEQ ID NO: 28244 - DNA, 20 bp, Artificial Sequence
  Description of Artificial Sequence: Synthetic oligonucleotide
  Target: COL7A1; (-) strand; PAM type: YTN; PAM sequence: CTT
agatggagttaggggtactc

SEQ ID NO: 28245 - DNA, 20 bp, Artificial Sequence
  Description of Artificial Sequence: Synthetic oligonucleotide
  Target: COL7A1; (-) strand; PAM type: YTN; PAM sequence: CTG
tgaccttagatggagttagg

SEQ ID NO: 28246 - DNA, 20 bp, Artificial Sequence
  Description of Artificial Sequence: Synthetic oligonucleotide
  Target: COL7A1; (-) strand; PAM type: YTN; PAM sequence: CTA
aagcagccaagacctgtgac

SEQ ID NO: 28247 - DNA, 20 bp, Artificial Sequence
  Description of Artificial Sequence: Synthetic oligonucleotide
  Target: COL7A1; (-) strand; PAM type: YTN; PAM sequence: TTG
acctaaagcagccaagacct

SEQ ID NO: 28248 - DNA, 20 bp, Artificial Sequence
  Description of Artificial Sequence: Synthetic oligonucleotide
  Target: COL7A1; (-) strand; PAM type: YTN; PAM sequence: CTG
tgattgacctaaagcagcca

SEQ ID NO: 28249 - DNA, 20 bp, Artificial Sequence
  Description of Artificial Sequence: Synthetic oligonucleotide
  Target: COL7A1; (-) strand; PAM type: YTN; PAM sequence: CTG
gtcactgtgattgacctaaa

SEQ ID NO: 28250 - DNA, 20 bp, Artificial Sequence
  Description of Artificial Sequence: Synthetic oligonucleotide
  Target: COL7A1; (-) strand; PAM type: YTN; PAM sequence: CTC
agcctggtcactgtgattga

SEQ ID NO: 28251 - DNA, 20 bp, Artificial Sequence
  Description of Artificial Sequence: Synthetic oligonucleotide
  Target: COL7A1; (-) strand; PAM type: YTN; PAM sequence: CTC
ctcagcctggtcactgtgat

SEQ ID NO: 28252 - DNA, 20 bp, Artificial Sequence
  Description of Artificial Sequence: Synthetic oligonucleotide
  Target: COL7A1; (-) strand; PAM type: YTN; PAM sequence: CTG
tccactcctcagcctggtca

SEQ ID NO: 28253 - DNA, 20 bp, Artificial Sequence
  Description of Artificial Sequence: Synthetic oligonucleotide
  Target: COL7A1; (-) strand; PAM type: YTN; PAM sequence: CTG
caggaacctgtccactcctc

SEQ ID NO: 28254 - DNA, 20 bp, Artificial Sequence
  Description of Artificial Sequence: Synthetic oligonucleotide
  Target: COL7A1; (-) strand; PAM type: YTN; PAM sequence: CTC
tgcaggaacctgtccactcc

SEQ ID NO: 28255 - DNA, 20 bp, Artificial Sequence
  Description of Artificial Sequence: Synthetic oligonucleotide
  Target: COL7A1; (-) strand; PAM type: YTN; PAM sequence: TTG
tggctctgcaggaacctgtc

SEQ ID NO: 28256 - DNA, 20 bp, Artificial Sequence
  Description of Artificial Sequence: Synthetic oligonucleotide
  Target: COL7A1; (-) strand; PAM type: YTN; PAM sequence: CTT
gtggctctgcaggaacctgt

SEQ ID NO: 28257 - DNA, 20 bp, Artificial Sequence
  Description of Artificial Sequence: Synthetic oligonucleotide
  Target: COL7A1; (-) strand; PAM type: YTN; PAM sequence: CTG
ccttgtggctctgcaggaac

SEQ ID NO: 28258 - DNA, 20 bp, Artificial Sequence
  Description of Artificial Sequence: Synthetic oligonucleotide
  Target: COL7A1; (-) strand; PAM type: YTN; PAM sequence: CTG
ctgccttgtggctctgcagg

SEQ ID NO: 28259 - DNA, 20 bp, Artificial Sequence
  Description of Artificial Sequence: Synthetic oligonucleotide
  Target: COL7A1; (-) strand; PAM type: YTN; PAM sequence: CTG
cagccccaccccccacggcg

SEQ ID NO: 28260 - DNA, 20 bp, Artificial Sequence
  Description of Artificial Sequence: Synthetic oligonucleotide
  Target: COL7A1; (-) strand; PAM type: YTN; PAM sequence: TTG
ggggtgagtcatccccaact

SEQ ID NO: 28261 - DNA, 20 bp, Artificial Sequence
  Description of Artificial Sequence: Synthetic oligonucleotide
  Target: COL7A1; (-) strand; PAM type: YTN; PAM sequence: CTG
gattgggggtgagtcatccc

SEQ ID NO: 28262 - DNA, 20 bp, Artificial Sequence
  Description of Artificial Sequence: Synthetic oligonucleotide
  Target: COL7A1; (-) strand; PAM type: YTN; PAM sequence: CTG
ggcacccccactggattggg

SEQ ID NO: 28263 - DNA, 20 bp, Artificial Sequence
  Description of Artificial Sequence: Synthetic oligonucleotide
  Target: COL7A1; (-) strand; PAM type: YTN; PAM sequence: TTG
tctgggcacccccactggat

SEQ ID NO: 28264 - DNA, 20 bp, Artificial Sequence
  Description of Artificial Sequence: Synthetic oligonucleotide
  Target: COL7A1; (-) strand; PAM type: YTN; PAM sequence: CTT
gtctgggcacccccactgga

SEQ ID NO: 28265 - DNA, 20 bp, Artificial Sequence
  Description of Artificial Sequence: Synthetic oligonucleotide
  Target: COL7A1; (-) strand; PAM type: YTN; PAM sequence: CTG
agggcttgtctgggcacccc

SEQ ID NO: 28266 - DNA, 20 bp, Artificial Sequence
  Description of Artificial Sequence: Synthetic oligonucleotide
  Target: COL7A1; (-) strand; PAM type: YTN; PAM sequence: CTG
aatcacaggagtggccggcg

SEQ ID NO: 28267 - DNA, 20 bp, Artificial Sequence
  Description of Artificial Sequence: Synthetic oligonucleotide
  Target: COL7A1; (-) strand; PAM type: YTN; PAM sequence: CTG
tcaaggagatccgggtgggg

SEQ ID NO: 28268 - DNA, 20 bp, Artificial Sequence
  Description of Artificial Sequence: Synthetic oligonucleotide
  Target: COL7A1; (-) strand; PAM type: YTN; PAM sequence: TTG
cctgtcaaggagatccgggt

SEQ ID NO: 28269 - DNA, 20 bp, Artificial Sequence
  Description of Artificial Sequence: Synthetic oligonucleotide
  Target: COL7A1; (-) strand; PAM type: YTN; PAM sequence: CTT
gcctgtcaaggagatccggg

SEQ ID NO: 28270 - DNA, 20 bp, Artificial Sequence
  Description of Artificial Sequence: Synthetic oligonucleotide
  Target: COL7A1; (-) strand; PAM type: YTN; PAM sequence: TTC
ttgcctgtcaaggagatccg

SEQ ID NO: 28271 - DNA, 20 bp, Artificial Sequence
  Description of Artificial Sequence: Synthetic oligonucleotide
  Target: COL7A1; (-) strand; PAM type: YTN; PAM sequence: CTT
cttgcctgtcaaggagatcc

SEQ ID NO: 28272 - DNA, 20 bp, Artificial Sequence
  Description of Artificial Sequence: Synthetic oligonucleotide
  Target: COL7A1; (-) strand; PAM type: YTN; PAM sequence: TTG
ccagggcttcttgcctgtca

SEQ ID NO: 28273 - DNA, 20 bp, Artificial Sequence
  Description of Artificial Sequence: Synthetic oligonucleotide
  Target: COL7A1; (-) strand; PAM type: YTN; PAM sequence: TTT
gccagggcttcttgcctgtc

SEQ ID NO: 28274 - DNA, 20 bp, Artificial Sequence
  Description of Artificial Sequence: Synthetic oligonucleotide
  Target: COL7A1; (-) strand; PAM type: YTN; PAM sequence: CTC
atttgccagggcttcttgcc

SEQ ID NO: 28275 - DNA, 20 bp, Artificial Sequence
  Description of Artificial Sequence: Synthetic oligonucleotide
  Target: COL7A1; (-) strand; PAM type: YTN; PAM sequence: CTA
agaccggcccagagtcactc

SEQ ID NO: 28276 - DNA, 20 bp, Artificial Sequence
  Description of Artificial Sequence: Synthetic oligonucleotide
  Target: COL7A1; (-) strand; PAM type: YTN; PAM sequence: TTC
cctaagaccggcccagagtc

SEQ ID NO: 28277 - DNA, 20 bp, Artificial Sequence
  Description of Artificial Sequence: Synthetic oligonucleotide
  Target: COL7A1; (-) strand; PAM type: YTN; PAM sequence: TTT
ccctaagaccggcccagagt

SEQ ID NO: 28278 - DNA, 20 bp, Artificial Sequence
  Description of Artificial Sequence: Synthetic oligonucleotide
  Target: COL7A1; (-) strand; PAM type: YTN; PAM sequence: TTG
gtttccctaagaccggccca

SEQ ID NO: 28279 - DNA, 20 bp, Artificial Sequence
  Description of Artificial Sequence: Synthetic oligonucleotide
  Target: COL7A1; (-) strand; PAM type: YTN; PAM sequence: CTT
ggtttccctaagaccggccc

SEQ ID NO: 28280 - DNA, 20 bp, Artificial Sequence
  Description of Artificial Sequence: Synthetic oligonucleotide
  Target: COL7A1; (-) strand; PAM type: YTN; PAM sequence: TTG
gatccaggccaaggggacct

SEQ ID NO: 28281 - DNA, 20 bp, Artificial Sequence
  Description of Artificial Sequence: Synthetic oligonucleotide
  Target: COL7A1; (-) strand; PAM type: YTN; PAM sequence: CTT
ggatccaggccaaggggacc

SEQ ID NO: 28282 - DNA, 20 bp, Artificial Sequence
  Description of Artificial Sequence: Synthetic oligonucleotide
  Target: COL7A1; (-) strand; PAM type: YTN; PAM sequence: TTA
cttggatccaggccaagggg

SEQ ID NO: 28283 - DNA, 20 bp, Artificial Sequence
  Description of Artificial Sequence: Synthetic oligonucleotide
  Target: COL7A1; (-) strand; PAM type: YTN; PAM sequence: CTA
caaagagggggtgagttact

SEQ ID NO: 28284 - DNA, 20 bp, Artificial Sequence
  Description of Artificial Sequence: Synthetic oligonucleotide
  Target: COL7A1; (-) strand; PAM type: YTN; PAM sequence: TTA
tcccctacaaagagggggtg

SEQ ID NO: 28285 - DNA, 20 bp, Artificial Sequence
  Description of Artificial Sequence: Synthetic oligonucleotide
  Target: COL7A1; (-) strand; PAM type: YTN; PAM sequence: CTT
atcccctacaaagagggggt

SEQ ID NO: 28286 - DNA, 20 bp, Artificial Sequence
  Description of Artificial Sequence: Synthetic oligonucleotide
  Target: COL7A1; (-) strand; PAM type: YTN; PAM sequence: TTC
cggcttatcccctacaaaga

SEQ ID NO: 28287 - DNA, 20 bp, Artificial Sequence
  Description of Artificial Sequence: Synthetic oligonucleotide
  Target: COL7A1; (-) strand; PAM type: YTN; PAM sequence: CTT
ccggcttatcccctacaaag

SEQ ID NO: 28288 - DNA, 20 bp, Artificial Sequence
  Description of Artificial Sequence: Synthetic oligonucleotide
  Target: COL7A1; (-) strand; PAM type: YTN; PAM sequence: CTC
cttccggcttatcccctaca

SEQ ID NO: 28289 - DNA, 20 bp, Artificial Sequence
  Description of Artificial Sequence: Synthetic oligonucleotide
  Target: COL7A1; (-) strand; PAM type: YTN; PAM sequence: CTC
ctccttccggcttatcccct

SEQ ID NO: 28290 - DNA, 20 bp, Artificial Sequence
  Description of Artificial Sequence: Synthetic oligonucleotide
  Target: COL7A1; (-) strand; PAM type: YTN; PAM sequence: CTC
tcctccttccggcttatccc

SEQ ID NO: 28291 - DNA, 20 bp, Artificial Sequence
  Description of Artificial Sequence: Synthetic oligonucleotide
  Target: COL7A1; (-) strand; PAM type: YTN; PAM sequence: TTC
tctcctccttccggcttatc

SEQ ID NO: 28292 - DNA, 20 bp, Artificial Sequence
  Description of Artificial Sequence: Synthetic oligonucleotide
  Target: COL7A1; (-) strand; PAM type: YTN; PAM sequence: CTG
ggatgtatgcataagcatga

SEQ ID NO: 28293 - DNA, 20 bp, Artificial Sequence
  Description of Artificial Sequence: Synthetic oligonucleotide
  Target: COL7A1; (-) strand; PAM type: YTN; PAM sequence: CTG
tgacatggtaggggatgtgg

SEQ ID NO: 28294 - DNA, 20 bp, Artificial Sequence
  Description of Artificial Sequence: Synthetic oligonucleotide
  Target: COL7A1; (-) strand; PAM type: YTN; PAM sequence: CTG
cctgtgacatggtaggggat

SEQ ID NO: 28295 - DNA, 20 bp, Artificial Sequence
  Description of Artificial Sequence: Synthetic oligonucleotide
  Target: COL7A1; (-) strand; PAM type: YTN; PAM sequence: TTG
catctgcctgtgacatggta

SEQ ID NO: 28296 - DNA, 20 bp, Artificial Sequence
  Description of Artificial Sequence: Synthetic oligonucleotide
  Target: COL7A1; (-) strand; PAM type: YTN; PAM sequence: CTG
gattgcatctgcctgtgaca

SEQ ID NO: 28297 - DNA, 20 bp, Artificial Sequence
  Description of Artificial Sequence: Synthetic oligonucleotide
  Target: COL7A1; (-) strand; PAM type: YTN; PAM sequence: CTG
caggcacagctggattgcat

SEQ ID NO: 28298 - DNA, 20 bp, Artificial Sequence
  Description of Artificial Sequence: Synthetic oligonucleotide
  Target: COL7A1; (-) strand; PAM type: YTN; PAM sequence: CTC
cctgcaggcacagctggatt

SEQ ID NO: 28299 - DNA, 20 bp, Artificial Sequence
  Description of Artificial Sequence: Synthetic oligonucleotide
  Target: COL7A1; (-) strand; PAM type: YTN; PAM sequence: CTC
cacagatgggcggccccctc

SEQ ID NO: 28300 - DNA, 20 bp, Artificial Sequence
  Description of Artificial Sequence: Synthetic oligonucleotide
  Target: COL7A1; (-) strand; PAM type: YTN; PAM sequence: CTG
tgggtggtcccgccctccac

SEQ ID NO: 28301 - DNA, 20 bp, Artificial Sequence
  Description of Artificial Sequence: Synthetic oligonucleotide
  Target: COL7A1; (-) strand; PAM type: YTN; PAM sequence: CTG
tcactgtgggtggtcccgcc

SEQ ID NO: 28302 - DNA, 20 bp, Artificial Sequence
  Description of Artificial Sequence: Synthetic oligonucleotide
  Target: COL7A1; (-) strand; PAM type: YTN; PAM sequence: CTG
agagatgagctgtcactgtg

SEQ ID NO: 28303 - DNA, 20 bp, Artificial Sequence
  Description of Artificial Sequence: Synthetic oligonucleotide
  Target: COL7A1; (-) strand; PAM type: YTN; PAM sequence: TTC
ctgagagatgagctgtcact

SEQ ID NO: 28304 - DNA, 20 bp, Artificial Sequence
  Description of Artificial Sequence: Synthetic oligonucleotide
  Target: COL7A1; (-) strand; PAM type: YTN; PAM sequence: CTC
gattcctgagagatgagctg

SEQ ID NO: 28305 - DNA, 20 bp, Artificial Sequence
  Description of Artificial Sequence: Synthetic oligonucleotide
  Target: COL7A1; (-) strand; PAM type: YTN; PAM sequence: CTG
gggcatggagggctcgattc

SEQ ID NO: 28306 - DNA, 20 bp, Artificial Sequence
  Description of Artificial Sequence: Synthetic oligonucleotide
  Target: COL7A1; (-) strand; PAM type: YTN; PAM sequence: CTG
gcctggggcatggagggctc

SEQ ID NO: 28307 - DNA, 20 bp, Artificial Sequence
  Description of Artificial Sequence: Synthetic oligonucleotide
  Target: COL7A1; (-) strand; PAM type: YTN; PAM sequence: CTG
tgggtgaggacatgtaggta

SEQ ID NO: 28308 - DNA, 20 bp, Artificial Sequence
  Description of Artificial Sequence: Synthetic oligonucleotide
  Target: COL7A1; (-) strand; PAM type: YTN; PAM sequence: CTA
caagaaaagtagatggaagg

SEQ ID NO: 28309 - DNA, 20 bp, Artificial Sequence
  Description of Artificial Sequence: Synthetic oligonucleotide
  Target: COL7A1; (-) strand; PAM type: YTN; PAM sequence: CTG
gtaggggagatgggtggcag

SEQ ID NO: 28310 - DNA, 20 bp, Artificial Sequence
  Description of Artificial Sequence: Synthetic oligonucleotide
  Target: COL7A1; (-) strand; PAM type: YTN; PAM sequence: CTC
ggcctggtaggggagatggg

SEQ ID NO: 28311 - DNA, 20 bp, Artificial Sequence
  Description of Artificial Sequence: Synthetic oligonucleotide
  Target: COL7A1; (-) strand; PAM type: YTN; PAM sequence: CTA
caggtaccatgagggcagtg

SEQ ID NO: 28312 - DNA, 20 bp, Artificial Sequence
  Description of Artificial Sequence: Synthetic oligonucleotide
  Target: COL7A1; (-) strand; PAM type: YTN; PAM sequence: CTG
gaagctacaggtaccatgag

SEQ ID NO: 28313 - DNA, 20 bp, Artificial Sequence
  Description of Artificial Sequence: Synthetic oligonucleotide
  Target: COL7A1; (-) strand; PAM type: YTN; PAM sequence: TTA
tgaagctggaagctacaggt

SEQ ID NO: 28314 - DNA, 20 bp, Artificial Sequence
  Description of Artificial Sequence: Synthetic oligonucleotide
  Target: COL7A1; (-) strand; PAM type: YTN; PAM sequence: CTG
ggtaaggggacaggagtaag

SEQ ID NO: 28315 - DNA, 20 bp, Artificial Sequence
  Description of Artificial Sequence: Synthetic oligonucleotide
  Target: COL7A1; (-) strand; PAM type: YTN; PAM sequence: CTG
ggggagggtgtgaagtcagc

SEQ ID NO: 28316 - DNA, 20 bp, Artificial Sequence
  Description of Artificial Sequence: Synthetic oligonucleotide
  Target: COL7A1; (-) strand; PAM type: YTN; PAM sequence: CTC
agaagcgaagctgggggagg

SEQ ID NO: 28317 - DNA, 20 bp, Artificial Sequence
  Description of Artificial Sequence: Synthetic oligonucleotide
  Target: COL7A1; (-) strand; PAM type: YTN; PAM sequence: CTG
tccacagcctcagaagcgaa

SEQ ID NO: 28318 - DNA, 20 bp, Artificial Sequence
  Description of Artificial Sequence: Synthetic oligonucleotide
  Target: COL7A1; (-) strand; PAM type: YTN; PAM sequence: TTG
gaggactgtccacagcctca

SEQ ID NO: 28319 - DNA, 20 bp, Artificial Sequence
  Description of Artificial Sequence: Synthetic oligonucleotide
  Target: COL7A1; (-) strand; PAM type: YTN; PAM sequence: CTG
gcgtggtgtgtgttggagga

SEQ ID NO: 28320 - DNA, 20 bp, Artificial Sequence
  Description of Artificial Sequence: Synthetic oligonucleotide
  Target: COL7A1; (-) strand; PAM type: YTN; PAM sequence: TTC
ggacagtggccctggcgtgg

SEQ ID NO: 28321 - DNA, 20 bp, Artificial Sequence
  Description of Artificial Sequence: Synthetic oligonucleotide
  Target: COL7A1; (-) strand; PAM type: YTN; PAM sequence: CTT
cggacagtggccctggcgtg

SEQ ID NO: 28322 - DNA, 20 bp, Artificial Sequence
  Description of Artificial Sequence: Synthetic oligonucleotide
  Target: COL7A1; (-) strand; PAM type: YTN; PAM sequence: CTC
cttcggacagtggccctggc

SEQ ID NO: 28323 - DNA, 20 bp, Artificial Sequence
  Description of Artificial Sequence: Synthetic oligonucleotide
  Target: COL7A1; (-) strand; PAM type: YTN; PAM sequence: CTA
atggagagatatgcatatac

SEQ ID NO: 28324 - DNA, 20 bp, Artificial Sequence
  Description of Artificial Sequence: Synthetic oligonucleotide
  Target: COL7A1; (-) strand; PAM type: YTN; PAM sequence: TTA
gtgtcacccatctaatggag

SEQ ID NO: 28325 - DNA, 20 bp, Artificial Sequence
  Description of Artificial Sequence: Synthetic oligonucleotide
  Target: COL7A1; (-) strand; PAM type: YTN; PAM sequence: CTT
agtgtcacccatctaatgga

SEQ ID NO: 28326 - DNA, 20 bp, Artificial Sequence
  Description of Artificial Sequence: Synthetic oligonucleotide
  Target: COL7A1; (-) strand; PAM type: YTN; PAM sequence: CTG
ccttagtgtcacccatctaa

SEQ ID NO: 28327 - DNA, 20 bp, Artificial Sequence
  Description of Artificial Sequence: Synthetic oligonucleotide
  Target: COL7A1; (-) strand; PAM type: YTN; PAM sequence: CTC
tgccttagtgtcacccatct

SEQ ID NO: 28328 - DNA, 20 bp, Artificial Sequence
  Description of Artificial Sequence: Synthetic oligonucleotide
  Target: COL7A1; (-) strand; PAM type: YTN; PAM sequence: CTC
tctgccttagtgtcacccat

SEQ ID NO: 28329 - DNA, 20 bp, Artificial Sequence
  Description of Artificial Sequence: Synthetic oligonucleotide
  Target: COL7A1; (-) strand; PAM type: YTN; PAM sequence: TTA
gcagtgcctctctgccttag

SEQ ID NO: 28330 - DNA, 20 bp, Artificial Sequence
  Description of Artificial Sequence: Synthetic oligonucleotide
  Target: COL7A1; (-) strand; PAM type: YTN; PAM sequence: CTT
agcagtgcctctctgcctta

SEQ ID NO: 28331 - DNA, 20 bp, Artificial Sequence
  Description of Artificial Sequence: Synthetic oligonucleotide
  Target: COL7A1; (-) strand; PAM type: YTN; PAM sequence: TTC
ttagcagtgcctctctgcct

SEQ ID NO: 28332 - DNA, 20 bp, Artificial Sequence
  Description of Artificial Sequence: Synthetic oligonucleotide
  Target: COL7A1; (-) strand; PAM type: YTN; PAM sequence: CTT
cttagcagtgcctctctgcc

SEQ ID NO: 28333 - DNA, 20 bp, Artificial Sequence
  Description of Artificial Sequence: Synthetic oligonucleotide
  Target: COL7A1; (-) strand; PAM type: YTN; PAM sequence: CTG
cccttcttagcagtgcctct

SEQ ID NO: 28334 - DNA, 20 bp, Artificial Sequence
  Description of Artificial Sequence: Synthetic oligonucleotide
  Target: COL7A1; (-) strand; PAM type: YTN; PAM sequence: TTA
gcaggaaaaaaagggggagc

SEQ ID NO: 28335 - DNA, 20 bp, Artificial Sequence
  Description of Artificial Sequence: Synthetic oligonucleotide
  Target: COL7A1; (-) strand; PAM type: YTN; PAM sequence: TTC
aggattagcaggaaaaaaag

SEQ ID NO: 28336 - DNA, 20 bp, Artificial Sequence
  Description of Artificial Sequence: Synthetic oligonucleotide
  Target: COL7A1; (-) strand; PAM type: YTN; PAM sequence: TTA
ttcaggattagcaggaaaaa

SEQ ID NO: 28337 - DNA, 20 bp, Artificial Sequence
  Description of Artificial Sequence: Synthetic oligonucleotide
  Target: COL7A1; (-) strand; PAM type: YTN; PAM sequence: CTG
cccagagttattcaggatta

SEQ ID NO: 28338 - DNA, 20 bp, Artificial Sequence
  Description of Artificial Sequence: Synthetic oligonucleotide
  Target: COL7A1; (-) strand; PAM type: YTN; PAM sequence: CTG
ggctgcccagagttattcag

SEQ ID NO: 28339 - DNA, 20 bp, Artificial Sequence
  Description of Artificial Sequence: Synthetic oligonucleotide
  Target: COL7A1; (-) strand; PAM type: YTN; PAM sequence: TTC
tgggctgcccagagttattc

SEQ ID NO: 28340 - DNA, 20 bp, Artificial Sequence
  Description of Artificial Sequence: Synthetic oligonucleotide
  Target: COL7A1; (-) strand; PAM type: YTN; PAM sequence: TTT
ctgggctgcccagagttatt

SEQ ID NO: 28341 - DNA, 20 bp, Artificial Sequence
  Description of Artificial Sequence: Synthetic oligonucleotide
  Target: COL7A1; (-) strand; PAM type: YTN; PAM sequence: CTT
tctgggctgcccagagttat

SEQ ID NO: 28342 - DNA, 20 bp, Artificial Sequence
  Description of Artificial Sequence: Synthetic oligonucleotide
  Target: COL7A1; (-) strand; PAM type: YTN; PAM sequence: TTG
gtgagtatagatgtgctttc

SEQ ID NO: 28343 - DNA, 20 bp, Artificial Sequence
  Description of Artificial Sequence: Synthetic oligonucleotide
  Target: COL7A1; (-) strand; PAM type: YTN; PAM sequence: CTT
ggtgagtatagatgtgcttt

SEQ ID NO: 28344 - DNA, 20 bp, Artificial Sequence
  Description of Artificial Sequence: Synthetic oligonucleotide
  Target: COL7A1; (-) strand; PAM type: YTN; PAM sequence: TTA
gaaggggcccagcagccttg

SEQ ID NO: 28345 - DNA, 20 bp, Artificial Sequence
  Description of Artificial Sequence: Synthetic oligonucleotide
  Target: COL7A1; (-) strand; PAM type: YTN; PAM sequence: CTG
tggggccgggcatattagaa

SEQ ID NO: 28346 - DNA, 20 bp, Artificial Sequence
  Description of Artificial Sequence: Synthetic oligonucleotide
  Target: COL7A1; (-) strand; PAM type: YTN; PAM sequence: CTG
tggatcccaggggaggctgt

SEQ ID NO: 28347 - DNA, 20 bp, Artificial Sequence
  Description of Artificial Sequence: Synthetic oligonucleotide
  Target: COL7A1; (-) strand; PAM type: YTN; PAM sequence: CTC
cctgtggatcccaggggagg

SEQ ID NO: 28348 - DNA, 20 bp, Artificial Sequence
  Description of Artificial Sequence: Synthetic oligonucleotide
  Target: COL7A1; (-) strand; PAM type: YTN; PAM sequence: CTG
tccccatatctccctgtgga

SEQ ID NO: 28349 - DNA, 20 bp, Artificial Sequence
  Description of Artificial Sequence: Synthetic oligonucleotide
  Target: COL7A1; (-) strand; PAM type: YTN; PAM sequence: CTG
tggaggagtccagccagtgc

SEQ ID NO: 28350 - DNA, 20 bp, Artificial Sequence
  Description of Artificial Sequence: Synthetic oligonucleotide
  Target: COL7A1; (-) strand; PAM type: YTN; PAM sequence: CTC
gggctgtggaggagtccagc

SEQ ID NO: 28351 - DNA, 20 bp, Artificial Sequence
  Description of Artificial Sequence: Synthetic oligonucleotide
  Target: COL7A1; (-) strand; PAM type: YTN; PAM sequence: CTG
gccacaccagagtcctcggg

SEQ ID NO: 28352 - DNA, 20 bp, Artificial Sequence
  Description of Artificial Sequence: Synthetic oligonucleotide
  Target: COL7A1; (-) strand; PAM type: YTN; PAM sequence: CTC
tggccacaccagagtcctcg

SEQ ID NO: 28353 - DNA, 20 bp, Artificial Sequence
  Description of Artificial Sequence: Synthetic oligonucleotide
  Target: COL7A1; (-) strand; PAM type: YTN; PAM sequence: CTC
cagctctggccacaccagag

SEQ ID NO: 28354 - DNA, 20 bp, Artificial Sequence
  Description of Artificial Sequence: Synthetic oligonucleotide
  Target: COL7A1; (-) strand; PAM type: YTN; PAM sequence: CTG
cctccagctctggccacacc

SEQ ID NO: 28355 - DNA, 20 bp, Artificial Sequence
  Description of Artificial Sequence: Synthetic oligonucleotide
  Target: COL7A1; (-) strand; PAM type: YTN; PAM sequence: TTC
actgcctccagctctggcca

SEQ ID NO: 28356 - DNA, 20 bp, Artificial Sequence
  Description of Artificial Sequence: Synthetic oligonucleotide
  Target: COL7A1; (-) strand; PAM type: YTN; PAM sequence: CTT
cactgcctccagctctggcc

SEQ ID NO: 28357 - DNA, 20 bp, Artificial Sequence
  Description of Artificial Sequence: Synthetic oligonucleotide
  Target: COL7A1; (-) strand; PAM type: YTN; PAM sequence: TTG
ggcaataggaaagcaggcag

SEQ ID NO: 28358 - DNA, 20 bp, Artificial Sequence
  Description of Artificial Sequence: Synthetic oligonucleotide
  Target: COL7A1; (-) strand; PAM type: YTN; PAM sequence: CTT
gggcaataggaaagcaggca

SEQ ID NO: 28359 - DNA, 20 bp, Artificial Sequence
  Description of Artificial Sequence: Synthetic oligonucleotide
  Target: COL7A1; (-) strand; PAM type: YTN; PAM sequence: TTC
cttgggcaataggaaagcag

SEQ ID NO: 28360 - DNA, 20 bp, Artificial Sequence
  Description of Artificial Sequence: Synthetic oligonucleotide
  Target: COL7A1; (-) strand; PAM type: YTN; PAM sequence: CTT
ccttgggcaataggaaagca

SEQ ID NO: 28361 - DNA, 20 bp, Artificial Sequence
  Description of Artificial Sequence: Synthetic oligonucleotide
  Target: COL7A1; (-) strand; PAM type: YTN; PAM sequence: TTG
gggggtcagtaataagggat

SEQ ID NO: 28362 - DNA, 20 bp, Artificial Sequence
  Description of Artificial Sequence: Synthetic oligonucleotide
  Target: COL7A1; (-) strand; PAM type: YTN; PAM sequence: TTT
ggggggtcagtaataaggga

SEQ ID NO: 28363 - DNA, 20 bp, Artificial Sequence
  Description of Artificial Sequence: Synthetic oligonucleotide
  Target: COL7A1; (-) strand; PAM type: YTN; PAM sequence: CTA
tgccccaggatagtttgggg

SEQ ID NO: 28364 - DNA, 20 bp, Artificial Sequence
  Description of Artificial Sequence: Synthetic oligonucleotide
  Target: COL7A1; (-) strand; PAM type: YTN; PAM sequence: TTG
gaataaggtcatagcactat

SEQ ID NO: 28365 - DNA, 20 bp, Artificial Sequence
  Description of Artificial Sequence: Synthetic oligonucleotide
  Target: COL7A1; (-) strand; PAM type: YTN; PAM sequence: CTT
ggaataaggtcatagcacta

SEQ ID NO: 28366 - DNA, 20 bp, Artificial Sequence
  Description of Artificial Sequence: Synthetic oligonucleotide
  Target: COL7A1; (-) strand; PAM type: YTN; PAM sequence: CTG
accttggaataaggtcatag

SEQ ID NO: 28367 - DNA, 20 bp, Artificial Sequence
  Description of Artificial Sequence: Synthetic oligonucleotide
  Target: COL7A1; (-) strand; PAM type: YTN; PAM sequence: CTG
aggagaccctgaccttggaa

SEQ ID NO: 28368 - DNA, 20 bp, Artificial Sequence
  Description of Artificial Sequence: Synthetic oligonucleotide
  Target: COL7A1; (-) strand; PAM type: YTN; PAM sequence: CTG
ggacatggctgaggagaccc

SEQ ID NO: 28369 - DNA, 20 bp, Artificial Sequence
  Description of Artificial Sequence: Synthetic oligonucleotide
  Target: COL7A1; (-) strand; PAM type: YTN; PAM sequence: TTG
cagggatggggggtcctggg

SEQ ID NO: 28370 - DNA, 20 bp, Artificial Sequence
  Description of Artificial Sequence: Synthetic oligonucleotide
  Target: COL7A1; (-) strand; PAM type: YTN; PAM sequence: CTT
gcagggatggggggtcctgg

SEQ ID NO: 28371 - DNA, 20 bp, Artificial Sequence
  Description of Artificial Sequence: Synthetic oligonucleotide
  Target: COL7A1; (-) strand; PAM type: YTN; PAM sequence: CTG
gagcacaccttgcagggatg

SEQ ID NO: 28372 - DNA, 20 bp, Artificial Sequence
  Description of Artificial Sequence: Synthetic oligonucleotide
  Target: COL7A1; (-) strand; PAM type: YTN; PAM sequence: CTG
cagccccccacctggagcac

SEQ ID NO: 28373 - DNA, 20 bp, Artificial Sequence
  Description of Artificial Sequence: Synthetic oligonucleotide
  Target: COL7A1; (-) strand; PAM type: YTN; PAM sequence: CTC
tgcagccccccacctggagc

SEQ ID NO: 28374 - DNA, 20 bp, Artificial Sequence
  Description of Artificial Sequence: Synthetic oligonucleotide
  Target: COL7A1; (-) strand; PAM type: YTN; PAM sequence: TTC
tctgcagccccccacctgga

SEQ ID NO: 28375 - DNA, 20 bp, Artificial Sequence
  Description of Artificial Sequence: Synthetic oligonucleotide
  Target: COL7A1; (-) strand; PAM type: YTN; PAM sequence: CTG
gttctctgcagccccccacc

SEQ ID NO: 28376 - DNA, 20 bp, Artificial Sequence
  Description of Artificial Sequence: Synthetic oligonucleotide
  Target: COL7A1; (-) strand; PAM type: YTN; PAM sequence: CTG
tgtgataacatacctggttc

SEQ ID NO: 28377 - DNA, 20 bp, Artificial Sequence
  Description of Artificial Sequence: Synthetic oligonucleotide
  Target: COL7A1; (-) strand; PAM type: YTN; PAM sequence: CTG
cctgtgtgataacatacctg

SEQ ID NO: 28378 - DNA, 20 bp, Artificial Sequence
  Description of Artificial Sequence: Synthetic oligonucleotide
  Target: COL7A1; (-) strand; PAM type: YTN; PAM sequence: TTA
gggggaaggggctgcctgtg

SEQ ID NO: 28379 - DNA, 20 bp, Artificial Sequence
  Description of Artificial Sequence: Synthetic oligonucleotide
  Target: COL7A1; (-) strand; PAM type: YTN; PAM sequence: CTT
agggggaaggggctgcctgt

SEQ ID NO: 28380 - DNA, 20 bp, Artificial Sequence
  Description of Artificial Sequence: Synthetic oligonucleotide
  Target: COL7A1; (-) strand; PAM type: YTN; PAM sequence: CTG
cacgggaggaggtgacagtc

SEQ ID NO: 28381 - DNA, 20 bp, Artificial Sequence
  Description of Artificial Sequence: Synthetic oligonucleotide
  Target: COL7A1; (-) strand; PAM type: YTN; PAM sequence: CTG
gctgcacgggaggaggtgac

SEQ ID NO: 28382 - DNA, 20 bp, Artificial Sequence
  Description of Artificial Sequence: Synthetic oligonucleotide
  Target: COL7A1; (-) strand; PAM type: YTN; PAM sequence: TTG
cccgccctggctgcacggga

SEQ ID NO: 28383 - DNA, 20 bp, Artificial Sequence
  Description of Artificial Sequence: Synthetic oligonucleotide
  Target: COL7A1; (-) strand; PAM type: YTN; PAM sequence: CTT
gcccgccctggctgcacggg

SEQ ID NO: 28384 - DNA, 20 bp, Artificial Sequence
  Description of Artificial Sequence: Synthetic oligonucleotide
  Target: COL7A1; (-) strand; PAM type: YTN; PAM sequence: CTC
ttgcccgccctggctgcacg

SEQ ID NO: 28385 - DNA, 20 bp, Artificial Sequence
  Description of Artificial Sequence: Synthetic oligonucleotide
  Target: COL7A1; (-) strand; PAM type: YTN; PAM sequence: CTG
ctcttgcccgccctggctgc

SEQ ID NO: 28386 - DNA, 20 bp, Artificial Sequence
  Description of Artificial Sequence: Synthetic oligonucleotide
  Target: COL7A1; (-) strand; PAM type: YTN; PAM sequence: CTG
gcctgctcttgcccgccctg

SEQ ID NO: 28387 - DNA, 20 bp, Artificial Sequence
  Description of Artificial Sequence: Synthetic oligonucleotide
  Target: COL7A1; (-) strand; PAM type: YTN; PAM sequence: CTG
tccatgccactggcctgctc

SEQ ID NO: 28388 - DNA, 20 bp, Artificial Sequence
  Description of Artificial Sequence: Synthetic oligonucleotide
  Target: COL7A1; (-) strand; PAM type: YTN; PAM sequence: CTG
taccgtactgtccatgccac

SEQ ID NO: 28389 - DNA, 20 bp, Artificial Sequence
  Description of Artificial Sequence: Synthetic oligonucleotide
  Target: COL7A1; (-) strand; PAM type: YTN; PAM sequence: CTG
gcccacgtgtgcacatatgt

SEQ ID NO: 28390 - DNA, 20 bp, Artificial Sequence
  Description of Artificial Sequence: Synthetic oligonucleotide
  Target: COL7A1; (-) strand; PAM type: YTN; PAM sequence: CTA
agactggcccacgtgtgcac

SEQ ID NO: 28391 - DNA, 20 bp, Artificial Sequence
  Description of Artificial Sequence: Synthetic oligonucleotide
  Target: COL7A1; (-) strand; PAM type: YTN; PAM sequence: CTC
ccctaagactggcccacgtg

SEQ ID NO: 28392 - DNA, 20 bp, Artificial Sequence
  Description of Artificial Sequence: Synthetic oligonucleotide
  Target: COL7A1; (-) strand; PAM type: YTN; PAM sequence: CTG
tctcccctaagactggccca

SEQ ID NO: 28393 - DNA, 20 bp, Artificial Sequence
  Description of Artificial Sequence: Synthetic oligonucleotide
  Target: COL7A1; (-) strand; PAM type: YTN; PAM sequence: CTC
ctgtctcccctaagactggc

SEQ ID NO: 28394 - DNA, 20 bp, Artificial Sequence
  Description of Artificial Sequence: Synthetic oligonucleotide
  Target: COL7A1; (-) strand; PAM type: YTN; PAM sequence: CTG
ggcctcctgtctcccctaag

SEQ ID NO: 28395 - DNA, 20 bp, Artificial Sequence
  Description of Artificial Sequence: Synthetic oligonucleotide
  Target: COL7A1; (-) strand; PAM type: YTN; PAM sequence: CTC
ccagctgggcctcctgtctc

SEQ ID NO: 28396 - DNA, 20 bp, Artificial Sequence
  Description of Artificial Sequence: Synthetic oligonucleotide
  Target: COL7A1; (-) strand; PAM type: YTN; PAM sequence: CTG
agcacccaccctcccagctg

SEQ ID NO: 28397 - DNA, 20 bp, Artificial Sequence
  Description of Artificial Sequence: Synthetic oligonucleotide
  Target: COL7A1; (-) strand; PAM type: YTN; PAM sequence: TTG
cctgagcacccaccctccca

SEQ ID NO: 28398 - DNA, 20 bp, Artificial Sequence
  Description of Artificial Sequence: Synthetic oligonucleotide
  Target: COL7A1; (-) strand; PAM type: YTN; PAM sequence: TTT
gcctgagcacccaccctccc

SEQ ID NO: 28399 - DNA, 20 bp, Artificial Sequence
  Description of Artificial Sequence: Synthetic oligonucleotide
  Target: COL7A1; (-) strand; PAM type: YTN; PAM sequence: CTG
atgaggtttgcctgagcacc

SEQ ID NO: 28400 - DNA, 20 bp, Artificial Sequence
  Description of Artificial Sequence: Synthetic oligonucleotide
  Target: COL7A1; (-) strand; PAM type: YTN; PAM sequence: TTC
tgatgaggtttgcctgagca

SEQ ID NO: 28401 - DNA, 20 bp, Artificial Sequence
  Description of Artificial Sequence: Synthetic oligonucleotide
  Target: COL7A1; (-) strand; PAM type: YTN; PAM sequence: CTC
aattctgatgaggtttgcct

SEQ ID NO: 28402 - DNA, 20 bp, Artificial Sequence
  Description of Artificial Sequence: Synthetic oligonucleotide
  Target: COL7A1; (-) strand; PAM type: YTN; PAM sequence: TTG
gaggcacctcaattctgatg

SEQ ID NO: 28403 - DNA, 20 bp, Artificial Sequence
  Description of Artificial Sequence: Synthetic oligonucleotide
  Target: COL7A1; (-) strand; PAM type: YTN; PAM sequence: TTT
ggaggcacctcaattctgat

SEQ ID NO: 28404 - DNA, 20 bp, Artificial Sequence
  Description of Artificial Sequence: Synthetic oligonucleotide
  Target: COL7A1; (-) strand; PAM type: YTN; PAM sequence: TTT
tggaggcacctcaattctga

SEQ ID NO: 28405 - DNA, 20 bp, Artificial Sequence
  Description of Artificial Sequence: Synthetic oligonucleotide
  Target: COL7A1; (-) strand; PAM type: YTN; PAM sequence: CTT
ttggaggcacctcaattctg

SEQ ID NO: 28406 - DNA, 20 bp, Artificial Sequence
  Description of Artificial Sequence: Synthetic oligonucleotide
  Target: COL7A1; (-) strand; PAM type: YTN; PAM sequence: TTC
ttttggaggcacctcaattc

SEQ ID NO: 28407 - DNA, 20 bp, Artificial Sequence
  Description of Artificial Sequence: Synthetic oligonucleotide
  Target: COL7A1; (-) strand; PAM type: YTN; PAM sequence: TTT
cttttggaggcacctcaatt

SEQ ID NO: 28408 - DNA, 20 bp, Artificial Sequence
  Description of Artificial Sequence: Synthetic oligonucleotide
  Target: COL7A1; (-) strand; PAM type: YTN; PAM sequence: CTT
tcttttggaggcacctcaat

SEQ ID NO: 28409 - DNA, 20 bp, Artificial Sequence
  Description of Artificial Sequence: Synthetic oligonucleotide
  Target: COL7A1; (-) strand; PAM type: YTN; PAM sequence: CTG
tcctttcttttggaggcacc

SEQ ID NO: 28410 - DNA, 20 bp, Artificial Sequence
  Description of Artificial Sequence: Synthetic oligonucleotide
  Target: COL7A1; (-) strand; PAM type: YTN; PAM sequence: CTC
acagcagcctgtcctttctt

SEQ ID NO: 28411 - DNA, 20 bp, Artificial Sequence
  Description of Artificial Sequence: Synthetic oligonucleotide
  Target: COL7A1; (-) strand; PAM type: YTN; PAM sequence: CTC
tcacagcagcctgtcctttc

SEQ ID NO: 28412 - DNA, 20 bp, Artificial Sequence
  Description of Artificial Sequence: Synthetic oligonucleotide
  Target: COL7A1; (-) strand; PAM type: YTN; PAM sequence: TTG
agagaccctctcacagcagc

SEQ ID NO: 28413 - DNA, 20 bp, Artificial Sequence
  Description of Artificial Sequence: Synthetic oligonucleotide
  Target: COL7A1; (-) strand; PAM type: YTN; PAM sequence: TTT
gagagaccctctcacagcag

SEQ ID NO: 28414 - DNA, 20 bp, Artificial Sequence
  Description of Artificial Sequence: Synthetic oligonucleotide
  Target: COL7A1; (-) strand; PAM type: YTN; PAM sequence: CTT
tgagagaccctctcacagca

SEQ ID NO: 28415 - DNA, 20 bp, Artificial Sequence
  Description of Artificial Sequence: Synthetic oligonucleotide
  Target: COL7A1; (-) strand; PAM type: YTN; PAM sequence: CTC
ccagcaccctttgagagacc

SEQ ID NO: 28416 - DNA, 20 bp, Artificial Sequence
  Description of Artificial Sequence: Synthetic oligonucleotide
  Target: COL7A1; (-) strand; PAM type: YTN; PAM sequence: CTC
tcccagcaccctttgagaga

SEQ ID NO: 28417 - DNA, 20 bp, Artificial Sequence
  Description of Artificial Sequence: Synthetic oligonucleotide
  Target: COL7A1; (-) strand; PAM type: YTN; PAM sequence: CTC
aacagcctctcccagcaccc

SEQ ID NO: 28418 - DNA, 20 bp, Artificial Sequence
  Description of Artificial Sequence: Synthetic oligonucleotide
  Target: COL7A1; (-) strand; PAM type: YTN; PAM sequence: TTC
tcaacagcctctcccagcac

SEQ ID NO: 28419 - DNA, 20 bp, Artificial Sequence
  Description of Artificial Sequence: Synthetic oligonucleotide
  Target: COL7A1; (-) strand; PAM type: YTN; PAM sequence: CTT
ctcaacagcctctcccagca

SEQ ID NO: 28420 - DNA, 20 bp, Artificial Sequence
  Description of Artificial Sequence: Synthetic oligonucleotide
  Target: COL7A1; (-) strand; PAM type: YTN; PAM sequence: CTA
ccttctcaacagcctctccc

SEQ ID NO: 28421 - DNA, 20 bp, Artificial Sequence
  Description of Artificial Sequence: Synthetic oligonucleotide
  Target: COL7A1; (-) strand; PAM type: YTN; PAM sequence: CTC
ctaccttctcaacagcctct

SEQ ID NO: 28422 - DNA, 20 bp, Artificial Sequence
  Description of Artificial Sequence: Synthetic oligonucleotide
  Target: COL7A1; (-) strand; PAM type: YTN; PAM sequence: TTA
ctcctaccttctcaacagcc

SEQ ID NO: 28423 - DNA, 20 bp, Artificial Sequence
  Description of Artificial Sequence: Synthetic oligonucleotide
  Target: COL7A1; (-) strand; PAM type: YTN; PAM sequence: CTT
actcctaccttctcaacagc

SEQ ID NO: 28424 - DNA, 20 bp, Artificial Sequence
  Description of Artificial Sequence: Synthetic oligonucleotide
  Target: COL7A1; (-) strand; PAM type: YTN; PAM sequence: TTC
caaccttactcctaccttct

SEQ ID NO: 28425 - DNA, 20 bp, Artificial Sequence
  Description of Artificial Sequence: Synthetic oligonucleotide
  Target: COL7A1; (-) strand; PAM type: YTN; PAM sequence: CTC
cagacgtggagtcattccaa

SEQ ID NO: 28426 - DNA, 20 bp, Artificial Sequence
  Description of Artificial Sequence: Synthetic oligonucleotide
  Target: COL7A1; (-) strand; PAM type: YTN; PAM sequence: CTC
atagaagctccagacgtgga

SEQ ID NO: 28427 - DNA, 20 bp, Artificial Sequence
  Description of Artificial Sequence: Synthetic oligonucleotide
  Target: COL7A1; (-) strand; PAM type: YTN; PAM sequence: CTC
gtgagtctcatagaagctcc

SEQ ID NO: 28428 - DNA, 20 bp, Artificial Sequence
  Description of Artificial Sequence: Synthetic oligonucleotide
  Target: COL7A1; (-) strand; PAM type: YTN; PAM sequence: CTG
ctcgtgagtctcatagaagc

SEQ ID NO: 28429 - DNA, 20 bp, Artificial Sequence
  Description of Artificial Sequence: Synthetic oligonucleotide
  Target: COL7A1; (-) strand; PAM type: YTN; PAM sequence: CTC
ctgctcgtgagtctcataga

SEQ ID NO: 28430 - DNA, 20 bp, Artificial Sequence
  Description of Artificial Sequence: Synthetic oligonucleotide
  Target: COL7A1; (-) strand; PAM type: YTN; PAM sequence: TTC
agagggccacactcctgctc

SEQ ID NO: 28431 - DNA, 20 bp, Artificial Sequence
  Description of Artificial Sequence: Synthetic oligonucleotide
  Target: COL7A1; (-) strand; PAM type: YTN; PAM sequence: CTT
cagagggccacactcctgct

SEQ ID NO: 28432 - DNA, 20 bp, Artificial Sequence
  Description of Artificial Sequence: Synthetic oligonucleotide
  Target: COL7A1; (-) strand; PAM type: YTN; PAM sequence: CTG
gggcttcagagggccacact

SEQ ID NO: 28433 - DNA, 20 bp, Artificial Sequence
  Description of Artificial Sequence: Synthetic oligonucleotide
  Target: COL7A1; (-) strand; PAM type: YTN; PAM sequence: CTC
ccaggaggccagagctgggg

SEQ ID NO: 28434 - DNA, 20 bp, Artificial Sequence
  Description of Artificial Sequence: Synthetic oligonucleotide
  Target: COL7A1; (-) strand; PAM type: YTN; PAM sequence: TTC
ctcccaggaggccagagctg

SEQ ID NO: 28435 - DNA, 20 bp, Artificial Sequence
  Description of Artificial Sequence: Synthetic oligonucleotide
  Target: COL7A1; (-) strand; PAM type: YTN; PAM sequence: CTG
tgttcctcccaggaggccag

SEQ ID NO: 28436 - DNA, 20 bp, Artificial Sequence
  Description of Artificial Sequence: Synthetic oligonucleotide
  Target: COL7A1; (-) strand; PAM type: YTN; PAM sequence: CTA
ggctgtgttcctcccaggag

SEQ ID NO: 28437 - DNA, 20 bp, Artificial Sequence
  Description of Artificial Sequence: Synthetic oligonucleotide
  Target: COL7A1; (-) strand; PAM type: YTN; PAM sequence: CTG
tgccctaggctgtgttcctc

SEQ ID NO: 28438 - DNA, 20 bp, Artificial Sequence
  Description of Artificial Sequence: Synthetic oligonucleotide
  Target: COL7A1; (-) strand; PAM type: YTN; PAM sequence: CTC
gggctgtgccctaggctgtg

SEQ ID NO: 28439 - DNA, 20 bp, Artificial Sequence
  Description of Artificial Sequence: Synthetic oligonucleotide
  Target: COL7A1; (-) strand; PAM type: YTN; PAM sequence: CTG
gcctcgggctgtgccctagg

SEQ ID NO: 28440 - DNA, 20 bp, Artificial Sequence
  Description of Artificial Sequence: Synthetic oligonucleotide
  Target: COL7A1; (-) strand; PAM type: YTN; PAM sequence: TTG
caggtaggcactggcctcgg

SEQ ID NO: 28441 - DNA, 20 bp, Artificial Sequence
  Description of Artificial Sequence: Synthetic oligonucleotide
  Target: COL7A1; (-) strand; PAM type: YTN; PAM sequence: CTG
atggggttgcaggtaggcac

SEQ ID NO: 28442 - DNA, 20 bp, Artificial Sequence
  Description of Artificial Sequence: Synthetic oligonucleotide
  Target: COL7A1; (-) strand; PAM type: YTN; PAM sequence: CTC
caccgccctgatggggttgc

SEQ ID NO: 28443 - DNA, 20 bp, Artificial Sequence
  Description of Artificial Sequence: Synthetic oligonucleotide
  Target: COL7A1; (-) strand; PAM type: YTN; PAM sequence: CTG
ggggctccaccgccctgatg

SEQ ID NO: 28444 - DNA, 20 bp, Artificial Sequence
  Description of Artificial Sequence: Synthetic oligonucleotide
  Target: COL7A1; (-) strand; PAM type: YTN; PAM sequence: CTC
tgggggctccaccgccctga

SEQ ID NO: 28445 - DNA, 20 bp, Artificial Sequence
  Description of Artificial Sequence: Synthetic oligonucleotide
  Target: COL7A1; (-) strand; PAM type: YTN; PAM sequence: TTG
ggagggagaaggatgtgctc

SEQ ID NO: 28446 - DNA, 20 bp, Artificial Sequence
  Description of Artificial Sequence: Synthetic oligonucleotide
  Target: COL7A1; (-) strand; PAM type: YTN; PAM sequence: CTT
gggagggagaaggatgtgct

SEQ ID NO: 28447 - DNA, 20 bp, Artificial Sequence
  Description of Artificial Sequence: Synthetic oligonucleotide
  Target: COL7A1; (-) strand; PAM type: YTN; PAM sequence: TTC
agggaaagcttgggagggag

SEQ ID NO: 28448 - DNA, 20 bp, Artificial Sequence
  Description of Artificial Sequence: Synthetic oligonucleotide
  Target: COL7A1; (-) strand; PAM type: YTN; PAM sequence: CTG
aggccagggaaggaaatgtt

SEQ ID NO: 28449 - DNA, 20 bp, Artificial Sequence
  Description of Artificial Sequence: Synthetic oligonucleotide
  Target: COL7A1; (-) strand; PAM type: YTN; PAM sequence: TTG
gaaacagatggggtgaggta

SEQ ID NO: 28450 - DNA, 20 bp, Artificial Sequence
  Description of Artificial Sequence: Synthetic oligonucleotide
  Target: COL7A1; (-) strand; PAM type: YTN; PAM sequence: CTG
gttggaaacagatggggtga

SEQ ID NO: 28451 - DNA, 20 bp, Artificial Sequence
  Description of Artificial Sequence: Synthetic oligonucleotide
  Target: COL7A1; (-) strand; PAM type: YTN; PAM sequence: CTG
ataaagaggccctggttgga

SEQ ID NO: 28452 - DNA, 20 bp, Artificial Sequence
  Description of Artificial Sequence: Synthetic oligonucleotide
  Target: COL7A1; (-) strand; PAM type: YTN; PAM sequence: CTG
ggacctgataaagaggccct

SEQ ID NO: 28453 - DNA, 20 bp, Artificial Sequence
  Description of Artificial Sequence: Synthetic oligonucleotide
  Target: COL7A1; (-) strand; PAM type: YTN; PAM sequence: TTG
gtggtgtccagggtacagtg

SEQ ID NO: 28454 - DNA, 20 bp, Artificial Sequence
  Description of Artificial Sequence: Synthetic oligonucleotide
  Target: COL7A1; (-) strand; PAM type: YTN; PAM sequence: TTT
ggtggtgtccagggtacagt

SEQ ID NO: 28455 - DNA, 20 bp, Artificial Sequence
  Description of Artificial Sequence: Synthetic oligonucleotide
  Target: COL7A1; (-) strand; PAM type: YTN; PAM sequence: TTC
catagtccagtgaggagttt

SEQ ID NO: 28456 - DNA, 20 bp, Artificial Sequence
  Description of Artificial Sequence: Synthetic oligonucleotide
  Target: COL7A1; (-) strand; PAM type: YTN; PAM sequence: CTT
ccatagtccagtgaggagtt

SEQ ID NO: 28457 - DNA, 20 bp, Artificial Sequence
  Description of Artificial Sequence: Synthetic oligonucleotide
  Target: COL7A1; (-) strand; PAM type: YTN; PAM sequence: TTG
gaggagggtaatcttccata

SEQ ID NO: 28458 - DNA, 20 bp, Artificial Sequence
  Description of Artificial Sequence: Synthetic oligonucleotide
  Target: COL7A1; (-) strand; PAM type: YTN; PAM sequence: CTG
ggagacgcggaggcacgagt

SEQ ID NO: 28459 - DNA, 20 bp, Artificial Sequence
  Description of Artificial Sequence: Synthetic oligonucleotide
  Target: COL7A1; (-) strand; PAM type: YTN; PAM sequence: TTC
ccagcagggctgggagacgc

SEQ ID NO: 28460 - DNA, 20 bp, Artificial Sequence
  Description of Artificial Sequence: Synthetic oligonucleotide
  Target: COL7A1; (-) strand; PAM type: YTN; PAM sequence: CTA
cattcccagcagggctggga

SEQ ID NO: 28461 - DNA, 20 bp, Artificial Sequence
  Description of Artificial Sequence: Synthetic oligonucleotide
  Target: COL7A1; (-) strand; PAM type: YTN; PAM sequence: CTG
taggggacacaaagaggact

SEQ ID NO: 28462 - DNA, 20 bp, Artificial Sequence
  Description of Artificial Sequence: Synthetic oligonucleotide
  Target: COL7A1; (-) strand; PAM type: YTN; PAM sequence: CTG
gagccagctgtaggggacac

SEQ ID NO: 28463 - DNA, 20 bp, Artificial Sequence
  Description of Artificial Sequence: Synthetic oligonucleotide
  Target: COL7A1; (-) strand; PAM type: YTN; PAM sequence: CTG
tggcagaacagaggtcatgg

SEQ ID NO: 28464 - DNA, 20 bp, Artificial Sequence
  Description of Artificial Sequence: Synthetic oligonucleotide
  Target: COL7A1; (-) strand; PAM type: YTN; PAM sequence: CTG
tgctgtggcagaacagaggt

SEQ ID NO: 28465 - DNA, 20 bp, Artificial Sequence
  Description of Artificial Sequence: Synthetic oligonucleotide
  Target: COL7A1; (-) strand; PAM type: YTN; PAM sequence: TTG
gtgagctgtgctgtggcaga

SEQ ID NO: 28466 - DNA, 20 bp, Artificial Sequence
  Description of Artificial Sequence: Synthetic oligonucleotide
  Target: COL7A1; (-) strand; PAM type: YTN; PAM sequence: CTT
ggtgagctgtgctgtggcag

SEQ ID NO: 28467 - DNA, 20 bp, Artificial Sequence
  Description of Artificial Sequence: Synthetic oligonucleotide
  Target: COL7A1; (-) strand; PAM type: YTN; PAM sequence: CTG
tatcagtcttggtgagctgt

SEQ ID NO: 28468 - DNA, 20 bp, Artificial Sequence
  Description of Artificial Sequence: Synthetic oligonucleotide
  Target: COL7A1; (-) strand; PAM type: YTN; PAM sequence: TTC
tgtatcagtcttggtgagct

SEQ ID NO: 28469 - DNA, 20 bp, Artificial Sequence
  Description of Artificial Sequence: Synthetic oligonucleotide
  Target: COL7A1; (-) strand; PAM type: YTN; PAM sequence: TTT
ctgtatcagtcttggtgagc

SEQ ID NO: 28470 - DNA, 20 bp, Artificial Sequence
  Description of Artificial Sequence: Synthetic oligonucleotide
  Target: COL7A1; (-) strand; PAM type: YTN; PAM sequence: CTC
aggccatatttctgtatcag

SEQ ID NO: 28471 - DNA, 20 bp, Artificial Sequence
  Description of Artificial Sequence: Synthetic oligonucleotide
  Target: COL7A1; (-) strand; PAM type: YTN; PAM sequence: CTC
tcaggccatatttctgtatc

SEQ ID NO: 28472 - DNA, 20 bp, Artificial Sequence
  Description of Artificial Sequence: Synthetic oligonucleotide
  Target: COL7A1; (-) strand; PAM type: YTN; PAM sequence: TTC
agcatggggactctcaggcc

SEQ ID NO: 28473 - DNA, 20 bp, Artificial Sequence
  Description of Artificial Sequence: Synthetic oligonucleotide
  Target: COL7A1; (-) strand; PAM type: YTN; PAM sequence: TTG
agattcagcatggggactct

SEQ ID NO: 28474 - DNA, 20 bp, Artificial Sequence
  Description of Artificial Sequence: Synthetic oligonucleotide
  Target: COL7A1; (-) strand; PAM type: YTN; PAM sequence: TTG
gtcagagttgagattcagca

SEQ ID NO: 28475 - DNA, 20 bp, Artificial Sequence
  Description of Artificial Sequence: Synthetic oligonucleotide
  Target: COL7A1; (-) strand; PAM type: YTN; PAM sequence: CTT
ggtcagagttgagattcagc

SEQ ID NO: 28476 - DNA, 20 bp, Artificial Sequence
  Description of Artificial Sequence: Synthetic oligonucleotide
  Target: COL7A1; (-) strand; PAM type: YTN; PAM sequence: CTG
tgaagagaagtgacttggtc

SEQ ID NO: 28477 - DNA, 20 bp, Artificial Sequence
  Description of Artificial Sequence: Synthetic oligonucleotide
  Target: COL7A1; (-) strand; PAM type: YTN; PAM sequence: TTA
ctgtgaagagaagtgacttg

SEQ ID NO: 28478 - DNA, 20 bp, Artificial Sequence
  Description of Artificial Sequence: Synthetic oligonucleotide
  Target: COL7A1; (-) strand; PAM type: YTN; PAM sequence: TTG
gaggttactgtgaagagaag

SEQ ID NO: 28479 - DNA, 20 bp, Artificial Sequence
  Description of Artificial Sequence: Synthetic oligonucleotide
  Target: COL7A1; (-) strand; PAM type: YTN; PAM sequence: CTG
gggaggtgtgttggaggtta

SEQ ID NO: 28480 - DNA, 20 bp, Artificial Sequence
  Description of Artificial Sequence: Synthetic oligonucleotide
  Target: COL7A1; (-) strand; PAM type: YTN; PAM sequence: CTG
gagccatgctggggaggtgt

SEQ ID NO: 28481 - DNA, 20 bp, Artificial Sequence
  Description of Artificial Sequence: Synthetic oligonucleotide
  Target: COL7A1; (-) strand; PAM type: YTN; PAM sequence: TTA
ccctggagccatgctgggga

SEQ ID NO: 28482 - DNA, 20 bp, Artificial Sequence
  Description of Artificial Sequence: Synthetic oligonucleotide
  Target: COL7A1; (-) strand; PAM type: YTN; PAM sequence: TTT
accctggagccatgctgggg

SEQ ID NO: 28483 - DNA, 20 bp, Artificial Sequence
  Description of Artificial Sequence: Synthetic oligonucleotide
  Target: COL7A1; (-) strand; PAM type: YTN; PAM sequence: CTT
taccctggagccatgctggg

SEQ ID NO: 28484 - DNA, 20 bp, Artificial Sequence
  Description of Artificial Sequence: Synthetic oligonucleotide
  Target: COL7A1; (-) strand; PAM type: YTN; PAM sequence: CTG
gtctttaccctggagccatg

SEQ ID NO: 28485 - DNA, 20 bp, Artificial Sequence
  Description of Artificial Sequence: Synthetic oligonucleotide
  Target: COL7A1; (-) strand; PAM type: YTN; PAM sequence: CTC
tggtctttaccctggagcca

SEQ ID NO: 28486 - DNA, 20 bp, Artificial Sequence
  Description of Artificial Sequence: Synthetic oligonucleotide
  Target: COL7A1; (-) strand; PAM type: YTN; PAM sequence: TTG
cgtaccaagccagggactct

SEQ ID NO: 28487 - DNA, 20 bp, Artificial Sequence
  Description of Artificial Sequence: Synthetic oligonucleotide
  Target: COL7A1; (-) strand; PAM type: YTN; PAM sequence: CTT
gcgtaccaagccagggactc

SEQ ID NO: 28488 - DNA, 20 bp, Artificial Sequence
  Description of Artificial Sequence: Synthetic oligonucleotide
  Target: COL7A1; (-) strand; PAM type: YTN; PAM sequence: CTA
agggaccttgcgtaccaagc

SEQ ID NO: 28489 - DNA, 20 bp, Artificial Sequence
  Description of Artificial Sequence: Synthetic oligonucleotide
  Target: COL7A1; (-) strand; PAM type: YTN; PAM sequence: TTC
taagggaccttgcgtaccaa

SEQ ID NO: 28490 - DNA, 20 bp, Artificial Sequence
  Description of Artificial Sequence: Synthetic oligonucleotide
  Target: COL7A1; (-) strand; PAM type: YTN; PAM sequence: CTG
gttctaagggaccttgcgta

SEQ ID NO: 28491 - DNA, 20 bp, Artificial Sequence
  Description of Artificial Sequence: Synthetic oligonucleotide
  Target: COL7A1; (-) strand; PAM type: YTN; PAM sequence: CTG
ggagtggtctggttctaagg

SEQ ID NO: 28492 - DNA, 20 bp, Artificial Sequence
  Description of Artificial Sequence: Synthetic oligonucleotide
  Target: COL7A1; (-) strand; PAM type: YTN; PAM sequence: TTG
ctgggagtggtctggttcta

SEQ ID NO: 28493 - DNA, 20 bp, Artificial Sequence
  Description of Artificial Sequence: Synthetic oligonucleotide
  Target: COL7A1; (-) strand; PAM type: YTN; PAM sequence: TTG
agttgctgggagtggtctgg

SEQ ID NO: 28494 - DNA, 20 bp, Artificial Sequence
  Description of Artificial Sequence: Synthetic oligonucleotide
  Target: COL7A1; (-) strand; PAM type: YTN; PAM sequence: CTT
gagttgctgggagtggtctg

SEQ ID NO: 28495 - DNA, 20 bp, Artificial Sequence
  Description of Artificial Sequence: Synthetic oligonucleotide
  Target: COL7A1; (-) strand; PAM type: YTN; PAM sequence: CTG
gacacgagagcttgagttgc

SEQ ID NO: 28496 - DNA, 20 bp, Artificial Sequence
  Description of Artificial Sequence: Synthetic oligonucleotide
  Target: COL7A1; (-) strand; PAM type: YTN; PAM sequence: CTA
caggtgtgctggacacgaga

SEQ ID NO: 28497 - DNA, 20 bp, Artificial Sequence
  Description of Artificial Sequence: Synthetic oligonucleotide
  Target: COL7A1; (-) strand; PAM type: YTN; PAM sequence: TTA
gaggctacaggtgtgctgga

SEQ ID NO: 28498 - DNA, 20 bp, Artificial Sequence
  Description of Artificial Sequence: Synthetic oligonucleotide
  Target: COL7A1; (-) strand; PAM type: YTN; PAM sequence: CTT
agaggctacaggtgtgctgg

SEQ ID NO: 28499 - DNA, 20 bp, Artificial Sequence
  Description of Artificial Sequence: Synthetic oligonucleotide
  Target: COL7A1; (-) strand; PAM type: YTN; PAM sequence: CTG
gcccttagaggctacaggtg

SEQ ID NO: 28500 - DNA, 20 bp, Artificial Sequence
  Description of Artificial Sequence: Synthetic oligonucleotide
  Target: COL7A1; (-) strand; PAM type: YTN; PAM sequence: CTA
agcccagcctggcccttaga

SEQ ID NO: 28501 - DNA, 20 bp, Artificial Sequence
  Description of Artificial Sequence: Synthetic oligonucleotide
  Target: COL7A1; (-) strand; PAM type: YTN; PAM sequence: TTC
taagcccagcctggccctta

SEQ ID NO: 28502 - DNA, 20 bp, Artificial Sequence
  Description of Artificial Sequence: Synthetic oligonucleotide
  Target: COL7A1; (-) strand; PAM type: YTN; PAM sequence: TTT
ctaagcccagcctggccctt

SEQ ID NO: 28503 - DNA, 20 bp, Artificial Sequence
  Description of Artificial Sequence: Synthetic oligonucleotide
  Target: COL7A1; (-) strand; PAM type: YTN; PAM sequence: TTC
atttctaagcccagcctggc

SEQ ID NO: 28504 - DNA, 20 bp, Artificial Sequence
  Description of Artificial Sequence: Synthetic oligonucleotide
  Target: COL7A1; (-) strand; PAM type: YTN; PAM sequence: CTT
catttctaagcccagcctgg

SEQ ID NO: 28505 - DNA, 20 bp, Artificial Sequence
  Description of Artificial Sequence: Synthetic oligonucleotide
  Target: COL7A1; (-) strand; PAM type: YTN; PAM sequence: CTG
gaggatggggcttcatttct

SEQ ID NO: 28506 - DNA, 20 bp, Artificial Sequence
  Description of Artificial Sequence: Synthetic oligonucleotide
  Target: COL7A1; (-) strand; PAM type: YTN; PAM sequence: CTC
ctggaggatggggcttcatt

SEQ ID NO: 28507 - DNA, 20 bp, Artificial Sequence
  Description of Artificial Sequence: Synthetic oligonucleotide
  Target: COL7A1; (-) strand; PAM type: YTN; PAM sequence: TTG
agctcctggaggatggggct

SEQ ID NO: 28508 - DNA, 20 bp, Artificial Sequence
  Description of Artificial Sequence: Synthetic oligonucleotide
  Target: COL7A1; (-) strand; PAM type: YTN; PAM sequence: TTT
gagctcctggaggatggggc

SEQ ID NO: 28509 - DNA, 20 bp, Artificial Sequence
  Description of Artificial Sequence: Synthetic oligonucleotide
  Target: COL7A1; (-) strand; PAM type: YTN; PAM sequence: TTG
tcaagtttgagctcctggag

SEQ ID NO: 28510 - DNA, 20 bp, Artificial Sequence
  Description of Artificial Sequence: Synthetic oligonucleotide
  Target: COL7A1; (-) strand; PAM type: YTN; PAM sequence: CTG
ttgtcaagtttgagctcctg

SEQ ID NO: 28511 - DNA, 20 bp, Artificial Sequence
  Description of Artificial Sequence: Synthetic oligonucleotide
  Target: COL7A1; (-) strand; PAM type: YTN; PAM sequence: CTC
atggaggtgcaacacccagg

SEQ ID NO: 28512 - DNA, 20 bp, Artificial Sequence
  Description of Artificial Sequence: Synthetic oligonucleotide
  Target: COL7A1; (-) strand; PAM type: YTN; PAM sequence: CTG
ggtgctcatggaggtgcaac

SEQ ID NO: 28513 - DNA, 20 bp, Artificial Sequence
  Description of Artificial Sequence: Synthetic oligonucleotide
  Target: COL7A1; (-) strand; PAM type: YTN; PAM sequence: CTG
acaggcccaaccctgggtgc

SEQ ID NO: 28514 - DNA, 20 bp, Artificial Sequence
  Description of Artificial Sequence: Synthetic oligonucleotide
  Target: COL7A1; (-) strand; PAM type: YTN; PAM sequence: CTG
ggcagcgcagaaccctgaca

SEQ ID NO: 28515 - DNA, 20 bp, Artificial Sequence
  Description of Artificial Sequence: Synthetic oligonucleotide
  Target: COL7A1; (-) strand; PAM type: YTN; PAM sequence: CTG
gagagaagatgctgggcagc

SEQ ID NO: 28516 - DNA, 20 bp, Artificial Sequence
  Description of Artificial Sequence: Synthetic oligonucleotide
  Target: COL7A1; (-) strand; PAM type: YTN; PAM sequence: TTG
tgaacggctggagagaagat

SEQ ID NO: 28517 - DNA, 20 bp, Artificial Sequence
  Description of Artificial Sequence: Synthetic oligonucleotide
  Target: COL7A1; (-) strand; PAM type: YTN; PAM sequence: TTT
gtgaacggctggagagaaga

SEQ ID NO: 28518 - DNA, 20 bp, Artificial Sequence
  Description of Artificial Sequence: Synthetic oligonucleotide
  Target: COL7A1; (-) strand; PAM type: YTN; PAM sequence: CTT
tgtgaacggctggagagaag

SEQ ID NO: 28519 - DNA, 20 bp, Artificial Sequence
  Description of Artificial Sequence: Synthetic oligonucleotide
  Target: COL7A1; (-) strand; PAM type: YTN; PAM sequence: CTA
ctttgtgaacggctggagag

SEQ ID NO: 28520 - DNA, 20 bp, Artificial Sequence
  Description of Artificial Sequence: Synthetic oligonucleotide
  Target: COL7A1; (-) strand; PAM type: YTN; PAM sequence: TTC
tactttgtgaacggctggag

SEQ ID NO: 28521 - DNA, 20 bp, Artificial Sequence
  Description of Artificial Sequence: Synthetic oligonucleotide
  Target: COL7A1; (-) strand; PAM type: YTN; PAM sequence: TTG
cgcagatcattctactttgt

SEQ ID NO: 28522 - DNA, 20 bp, Artificial Sequence
  Description of Artificial Sequence: Synthetic oligonucleotide
  Target: COL7A1; (-) strand; PAM type: YTN; PAM sequence: CTG
gggcattgcgcagatcattc

SEQ ID NO: 28523 - DNA, 20 bp, Artificial Sequence
  Description of Artificial Sequence: Synthetic oligonucleotide
  Target: COL7A1; (-) strand; PAM type: YTN; PAM sequence: CTA
cggcccgggactggggcatt

SEQ ID NO: 28524 - DNA, 20 bp, Artificial Sequence
  Description of Artificial Sequence: Synthetic oligonucleotide
  Target: COL7A1; (-) strand; PAM type: YTN; PAM sequence: TTC
tacggcccgggactggggca

SEQ ID NO: 28525 - DNA, 20 bp, Artificial Sequence
  Description of Artificial Sequence: Synthetic oligonucleotide
  Target: COL7A1; (-) strand; PAM type: YTN; PAM sequence: CTT
ctacggcccgggactggggc

SEQ ID NO: 28526 - DNA, 20 bp, Artificial Sequence
  Description of Artificial Sequence: Synthetic oligonucleotide
  Target: COL7A1; (-) strand; PAM type: YTN; PAM sequence: TTA
agcaccttctacggcccggg

SEQ ID NO: 28527 - DNA, 20 bp, Artificial Sequence
  Description of Artificial Sequence: Synthetic oligonucleotide
  Target: COL7A1; (-) strand; PAM type: YTN; PAM sequence: TTG
ttaagcaccttctacggccc

SEQ ID NO: 28528 - DNA, 20 bp, Artificial Sequence
  Description of Artificial Sequence: Synthetic oligonucleotide
  Target: COL7A1; (-) strand; PAM type: YTN; PAM sequence: TTT
gttaagcaccttctacggcc

SEQ ID NO: 28529 - DNA, 20 bp, Artificial Sequence
  Description of Artificial Sequence: Synthetic oligonucleotide
  Target: COL7A1; (-) strand; PAM type: YTN; PAM sequence: TTC
ggagacatttgttaagcacc

SEQ ID NO: 28530 - DNA, 20 bp, Artificial Sequence
  Description of Artificial Sequence: Synthetic oligonucleotide
  Target: COL7A1; (-) strand; PAM type: YTN; PAM sequence: TTG
ccaattcggagacatttgtt

SEQ ID NO: 28531 - DNA, 20 bp, Artificial Sequence
  Description of Artificial Sequence: Synthetic oligonucleotide
  Target: COL7A1; (-) strand; PAM type: YTN; PAM sequence: TTG
ccatacgttgccaattcgga

SEQ ID NO: 28532 - DNA, 20 bp, Artificial Sequence
  Description of Artificial Sequence: Synthetic oligonucleotide
  Target: COL7A1; (-) strand; PAM type: YTN; PAM sequence: TTG
gttgccatacgttgccaatt

SEQ ID NO: 28533 - DNA, 20 bp, Artificial Sequence
  Description of Artificial Sequence: Synthetic oligonucleotide
  Target: COL7A1; (-) strand; PAM type: YTN; PAM sequence: CTC
accattggttgccatacgtt

SEQ ID NO: 28534 - DNA, 20 bp, Artificial Sequence
  Description of Artificial Sequence: Synthetic oligonucleotide
  Target: COL7A1; (-) strand; PAM type: YTN; PAM sequence: TTC
cctcaccattggttgccata

SEQ ID NO: 28535 - DNA, 20 bp, Artificial Sequence
  Description of Artificial Sequence: Synthetic oligonucleotide
  Target: COL7A1; (-) strand; PAM type: YTN; PAM sequence: TTT
ccctcaccattggttgccat

SEQ ID NO: 28536 - DNA, 20 bp, Artificial Sequence
  Description of Artificial Sequence: Synthetic oligonucleotide
  Target: COL7A1; (-) strand; PAM type: YTN; PAM sequence: CTT
tccctcaccattggttgcca

SEQ ID NO: 28537 - DNA, 20 bp, Artificial Sequence
  Description of Artificial Sequence: Synthetic oligonucleotide
  Target: COL7A1; (-) strand; PAM type: YTN; PAM sequence: CTG
cctttccctcaccattggtt

SEQ ID NO: 28538 - DNA, 20 bp, Artificial Sequence
  Description of Artificial Sequence: Synthetic oligonucleotide
  Target: COL7A1; (-) strand; PAM type: YTN; PAM sequence: CTG
ccccactgcctttccctcac

SEQ ID NO: 28539 - DNA, 20 bp, Artificial Sequence
  Description of Artificial Sequence: Synthetic oligonucleotide
  Target: COL7A1; (-) strand; PAM type: YTN; PAM sequence: CTA
tcaccctgccccactgcctt

SEQ ID NO: 28540 - DNA, 20 bp, Artificial Sequence
  Description of Artificial Sequence: Synthetic oligonucleotide
  Target: COL7A1; (-) strand; PAM type: YTN; PAM sequence: TTG
tatcactatcaccctgcccc

SEQ ID NO: 28541 - DNA, 20 bp, Artificial Sequence
  Description of Artificial Sequence: Synthetic oligonucleotide
  Target: COL7A1; (-) strand; PAM type: YTN; PAM sequence: CTT
gtatcactatcaccctgccc

SEQ ID NO: 28542 - DNA, 20 bp, Artificial Sequence
  Description of Artificial Sequence: Synthetic oligonucleotide
  Target: COL7A1; (-) strand; PAM type: YTN; PAM sequence: TTG
gaagtagcccaaggaaccct

SEQ ID NO: 28543 - DNA, 20 bp, Artificial Sequence
  Description of Artificial Sequence: Synthetic oligonucleotide
  Target: COL7A1; (-) strand; PAM type: YTN; PAM sequence: CTT
ggaagtagcccaaggaaccc

SEQ ID NO: 28544 - DNA, 20 bp, Artificial Sequence
  Description of Artificial Sequence: Synthetic oligonucleotide
  Target: COL7A1; (-) strand; PAM type: YTN; PAM sequence: TTC
agaagtccccccagcatcgt

SEQ ID NO: 28545 - DNA, 20 bp, Artificial Sequence
  Description of Artificial Sequence: Synthetic oligonucleotide
  Target: COL7A1; (-) strand; PAM type: YTN; PAM sequence: CTG
ttcagaagtccccccagcat

SEQ ID NO: 28546 - DNA, 20 bp, Artificial Sequence
  Description of Artificial Sequence: Synthetic oligonucleotide
  Target: COL7A1; (-) strand; PAM type: YTN; PAM sequence: TTA
gaagatggctgttcagaagt

SEQ ID NO: 28547 - DNA, 20 bp, Artificial Sequence
  Description of Artificial Sequence: Synthetic oligonucleotide
  Target: COL7A1; (-) strand; PAM type: YTN; PAM sequence: TTT
agaagatggctgttcagaag

SEQ ID NO: 28548 - DNA, 20 bp, Artificial Sequence
  Description of Artificial Sequence: Synthetic oligonucleotide
  Target: COL7A1; (-) strand; PAM type: YTN; PAM sequence: TTT
tagaagatggctgttcagaa

SEQ ID NO: 28549 - DNA, 20 bp, Artificial Sequence
  Description of Artificial Sequence: Synthetic oligonucleotide
  Target: COL7A1; (-) strand; PAM type: YTN; PAM sequence: CTT
ttagaagatggctgttcaga

SEQ ID NO: 28550 - DNA, 20 bp, Artificial Sequence
  Description of Artificial Sequence: Synthetic oligonucleotide
  Target: COL7A1; (-) strand; PAM type: YTN; PAM sequence: CTG
ggacaaggtcttttagaaga

SEQ ID NO: 28551 - DNA, 20 bp, Artificial Sequence
  Description of Artificial Sequence: Synthetic oligonucleotide
  Target: COL7A1; (-) strand; PAM type: YTN; PAM sequence: CTG
gcagtcacaagcagggtgct

SEQ ID NO: 28552 - DNA, 20 bp, Artificial Sequence
  Description of Artificial Sequence: Synthetic oligonucleotide
  Target: COL7A1; (-) strand; PAM type: YTN; PAM sequence: CTG
cctggcagtcacaagcaggg

SEQ ID NO: 28553 - DNA, 20 bp, Artificial Sequence
  Description of Artificial Sequence: Synthetic oligonucleotide
  Target: COL7A1; (-) strand; PAM type: YTN; PAM sequence: TTG
aggaagtcgctgcctggcag

SEQ ID NO: 28554 - DNA, 20 bp, Artificial Sequence
  Description of Artificial Sequence: Synthetic oligonucleotide
  Target: COL7A1; (-) strand; PAM type: YTN; PAM sequence: TTT
gaggaagtcgctgcctggca

SEQ ID NO: 28555 - DNA, 20 bp, Artificial Sequence
  Description of Artificial Sequence: Synthetic oligonucleotide
  Target: COL7A1; (-) strand; PAM type: YTN; PAM sequence: CTT
tgaggaagtcgctgcctggc

SEQ ID NO: 28556 - DNA, 20 bp, Artificial Sequence
  Description of Artificial Sequence: Synthetic oligonucleotide
  Target: COL7A1; (-) strand; PAM type: YTN; PAM sequence: TTC
ctttgaggaagtcgctgcct

SEQ ID NO: 28557 - DNA, 20 bp, Artificial Sequence
  Description of Artificial Sequence: Synthetic oligonucleotide
  Target: COL7A1; (-) strand; PAM type: YTN; PAM sequence: TTT
cctttgaggaagtcgctgcc

SEQ ID NO: 28558 - DNA, 20 bp, Artificial Sequence
  Description of Artificial Sequence: Synthetic oligonucleotide
  Target: COL7A1; (-) strand; PAM type: YTN; PAM sequence: TTT
tcctttgaggaagtcgctgc

SEQ ID NO: 28559 - DNA, 20 bp, Artificial Sequence
  Description of Artificial Sequence: Synthetic oligonucleotide
  Target: COL7A1; (-) strand; PAM type: YTN; PAM sequence: TTG
aaagcgaggggcccaatttt

SEQ ID NO: 28560 - DNA, 20 bp, Artificial Sequence
  Description of Artificial Sequence: Synthetic oligonucleotide
  Target: COL7A1; (-) strand; PAM type: YTN; PAM sequence: CTG
ggatcccagggggaagttga

SEQ ID NO: 28561 - DNA, 20 bp, Artificial Sequence
  Description of Artificial Sequence: Synthetic oligonucleotide
  Target: COL7A1; (-) strand; PAM type: YTN; PAM sequence: CTC
tgggatcccagggggaagtt

SEQ ID NO: 28562 - DNA, 20 bp, Artificial Sequence
  Description of Artificial Sequence: Synthetic oligonucleotide
  Target: COL7A1; (-) strand; PAM type: YTN; PAM sequence: TTC
tctgggatcccagggggaag

SEQ ID NO: 28563 - DNA, 20 bp, Artificial Sequence
  Description of Artificial Sequence: Synthetic oligonucleotide
  Target: COL7A1; (-) strand; PAM type: YTN; PAM sequence: TTC
cacagtcaggttctctggga

SEQ ID NO: 28564 - DNA, 20 bp, Artificial Sequence
  Description of Artificial Sequence: Synthetic oligonucleotide
  Target: COL7A1; (-) strand; PAM type: YTN; PAM sequence: CTT
ccacagtcaggttctctggg

SEQ ID NO: 28565 - DNA, 20 bp, Artificial Sequence
  Description of Artificial Sequence: Synthetic oligonucleotide
  Target: COL7A1; (-) strand; PAM type: YTN; PAM sequence: CTG
caccccccagtgcttccaca

SEQ ID NO: 28566 - DNA, 20 bp, Artificial Sequence
  Description of Artificial Sequence: Synthetic oligonucleotide
  Target: COL7A1; (-) strand; PAM type: YTN; PAM sequence: CTC
ctgcaccccccagtgcttcc

SEQ ID NO: 28567 - DNA, 20 bp, Artificial Sequence
  Description of Artificial Sequence: Synthetic oligonucleotide
  Target: COL7A1; (-) strand; PAM type: YTN; PAM sequence: CTC
ctcctgcaccccccagtgct

SEQ ID NO: 28568 - DNA, 20 bp, Artificial Sequence
  Description of Artificial Sequence: Synthetic oligonucleotide
  Target: COL7A1; (-) strand; PAM type: YTN; PAM sequence: CTG
ctcctcctgcaccccccagt

SEQ ID NO: 28569 - DNA, 20 bp, Artificial Sequence
  Description of Artificial Sequence: Synthetic oligonucleotide
  Target: COL7A1; (-) strand; PAM type: YTN; PAM sequence: CTG
gtccccatggtgggtgcgca

SEQ ID NO: 28570 - DNA, 20 bp, Artificial Sequence
  Description of Artificial Sequence: Synthetic oligonucleotide
  Target: COL7A1; (-) strand; PAM type: YTN; PAM sequence: CTC
tggtccccatggtgggtgcg

SEQ ID NO: 28571 - DNA, 20 bp, Artificial Sequence
  Description of Artificial Sequence: Synthetic oligonucleotide
  Target: COL7A1; (-) strand; PAM type: YTN; PAM sequence: TTG
gctctggtccccatggtggg

SEQ ID NO: 28572 - DNA, 20 bp, Artificial Sequence
  Description of Artificial Sequence: Synthetic oligonucleotide
  Target: COL7A1; (-) strand; PAM type: YTN; PAM sequence: TTT
ggctctggtccccatggtgg

SEQ ID NO: 28573 - DNA, 20 bp, Artificial Sequence
  Description of Artificial Sequence: Synthetic oligonucleotide
  Target: COL7A1; (-) strand; PAM type: YTN; PAM sequence: TTT
tggctctggtccccatggtg

SEQ ID NO: 28574 - DNA, 20 bp, Artificial Sequence
  Description of Artificial Sequence: Synthetic oligonucleotide
  Target: COL7A1; (-) strand; PAM type: YTN; PAM sequence: CTT
ttggctctggtccccatggt

SEQ ID NO: 28575 - DNA, 20 bp, Artificial Sequence
  Description of Artificial Sequence: Synthetic oligonucleotide
  Target: COL7A1; (-) strand; PAM type: YTN; PAM sequence: CTC
ttttggctctggtccccatg

SEQ ID NO: 28576 - DNA, 20 bp, Artificial Sequence
  Description of Artificial Sequence: Synthetic oligonucleotide
  Target: COL7A1; (-) strand; PAM type: YTN; PAM sequence: TTA
tctcttttggctctggtccc

SEQ ID NO: 28577 - DNA, 20 bp, Artificial Sequence
  Description of Artificial Sequence: Synthetic oligonucleotide
  Target: COL7A1; (-) strand; PAM type: YTN; PAM sequence: CTG
ttatctcttttggctctggt

SEQ ID NO: 28578 - DNA, 20 bp, Artificial Sequence
  Description of Artificial Sequence: Synthetic oligonucleotide
  Target: COL7A1; (-) strand; PAM type: YTN; PAM sequence: CTC
tgttatctcttttggctctg

SEQ ID NO: 28579 - DNA, 20 bp, Artificial Sequence
  Description of Artificial Sequence: Synthetic oligonucleotide
  Target: COL7A1; (-) strand; PAM type: YTN; PAM sequence: CTA
gtccctctgttatctctttt

SEQ ID NO: 28580 - DNA, 20 bp, Artificial Sequence
  Description of Artificial Sequence: Synthetic oligonucleotide
  Target: COL7A1; (-) strand; PAM type: YTN; PAM sequence: CTA
cctagtccctctgttatctc

SEQ ID NO: 28581 - DNA, 20 bp, Artificial Sequence
  Description of Artificial Sequence: Synthetic oligonucleotide
  Target: COL7A1; (-) strand; PAM type: YTN; PAM sequence: TTA
gctacctagtccctctgtta

SEQ ID NO: 28582 - DNA, 20 bp, Artificial Sequence
  Description of Artificial Sequence: Synthetic oligonucleotide
  Target: COL7A1; (-) strand; PAM type: YTN; PAM sequence: CTT
agctacctagtccctctgtt

SEQ ID NO: 28583 - DNA, 20 bp, Artificial Sequence
  Description of Artificial Sequence: Synthetic oligonucleotide
  Target: COL7A1; (-) strand; PAM type: YTN; PAM sequence: CTC
ttagctacctagtccctctg

SEQ ID NO: 28584 - DNA, 20 bp, Artificial Sequence
  Description of Artificial Sequence: Synthetic oligonucleotide
  Target: COL7A1; (-) strand; PAM type: YTN; PAM sequence: CTG
gtacagctcttagctaccta

SEQ ID NO: 28585 - DNA, 20 bp, Artificial Sequence
  Description of Artificial Sequence: Synthetic oligonucleotide
  Target: COL7A1; (-) strand; PAM type: YTN; PAM sequence: CTG
aggcagccaggacctggtac

SEQ ID NO: 28586 - DNA, 20 bp, Artificial Sequence
  Description of Artificial Sequence: Synthetic oligonucleotide
  Target: COL7A1; (-) strand; PAM type: YTN; PAM sequence: TTC
ctgaggcagccaggacctgg

SEQ ID NO: 28587 - DNA, 20 bp, Artificial Sequence
  Description of Artificial Sequence: Synthetic oligonucleotide
  Target: COL7A1; (-) strand; PAM type: YTN; PAM sequence: TTT
cctgaggcagccaggacctg

SEQ ID NO: 28588 - DNA, 20 bp, Artificial Sequence
  Description of Artificial Sequence: Synthetic oligonucleotide
  Target: COL7A1; (-) strand; PAM type: YTN; PAM sequence: TTT
tcctgaggcagccaggacct

SEQ ID NO: 28589 - DNA, 20 bp, Artificial Sequence
  Description of Artificial Sequence: Synthetic oligonucleotide
  Target: COL7A1; (-) strand; PAM type: YTN; PAM sequence: CTC
cccattttcctgaggcagcc

SEQ ID NO: 28590 - DNA, 20 bp, Artificial Sequence
  Description of Artificial Sequence: Synthetic oligonucleotide
  Target: COL7A1; (-) strand; PAM type: YTN; PAM sequence: CTG
acaatcccctccccattttc

SEQ ID NO: 28591 - DNA, 20 bp, Artificial Sequence
  Description of Artificial Sequence: Synthetic oligonucleotide
  Target: COL7A1; (-) strand; PAM type: YTN; PAM sequence: CTG
gcctgacaatcccctcccca

SEQ ID NO: 28592 - DNA, 20 bp, Artificial Sequence
  Description of Artificial Sequence: Synthetic oligonucleotide
  Target: COL7A1; (-) strand; PAM type: YTN; PAM sequence: CTG
ctggcctgacaatcccctcc

SEQ ID NO: 28593 - DNA, 20 bp, Artificial Sequence
  Description of Artificial Sequence: Synthetic oligonucleotide
  Target: COL7A1; (-) strand; PAM type: YTN; PAM sequence: TTG
tcccaggcaagtccagagct

SEQ ID NO: 28594 - DNA, 20 bp, Artificial Sequence
  Description of Artificial Sequence: Synthetic oligonucleotide
  Target: COL7A1; (-) strand; PAM type: YTN; PAM sequence: TTT
gtcccaggcaagtccagagc

SEQ ID NO: 28595 - DNA, 20 bp, Artificial Sequence
  Description of Artificial Sequence: Synthetic oligonucleotide
  Target: COL7A1; (-) strand; PAM type: YTN; PAM sequence: CTA
catttgtcccaggcaagtcc

SEQ ID NO: 28596 - DNA, 20 bp, Artificial Sequence
  Description of Artificial Sequence: Synthetic oligonucleotide
  Target: COL7A1; (-) strand; PAM type: YTN; PAM sequence: CTA
ctacatttgtcccaggcaag

SEQ ID NO: 28597 - DNA, 20 bp, Artificial Sequence
  Description of Artificial Sequence: Synthetic oligonucleotide
  Target: COL7A1; (-) strand; PAM type: YTN; PAM sequence: CTC
tactacatttgtcccaggca

SEQ ID NO: 28598 - DNA, 20 bp, Artificial Sequence
  Description of Artificial Sequence: Synthetic oligonucleotide
  Target: COL7A1; (-) strand; PAM type: YTN; PAM sequence: CTC
cctctactacatttgtccca

SEQ ID NO: 28599 - DNA, 20 bp, Artificial Sequence
  Description of Artificial Sequence: Synthetic oligonucleotide
  Target: COL7A1; (-) strand; PAM type: YTN; PAM sequence: CTC
agtggggcccgagccccctc

SEQ ID NO: 28600 - DNA, 20 bp, Artificial Sequence
  Description of Artificial Sequence: Synthetic oligonucleotide
  Target: COL7A1; (-) strand; PAM type: YTN; PAM sequence: CTG
agctcagtggggcccgagcc

SEQ ID NO: 28601 - DNA, 20 bp, Artificial Sequence
  Description of Artificial Sequence: Synthetic oligonucleotide
  Target: COL7A1; (-) strand; PAM type: YTN; PAM sequence: CTC
caagaatagccctgagctca

SEQ ID NO: 28602 - DNA, 20 bp, Artificial Sequence
  Description of Artificial Sequence: Synthetic oligonucleotide
  Target: COL7A1; (-) strand; PAM type: YTN; PAM sequence: CTC
aggctccaagaatagccctg

SEQ ID NO: 28603 - DNA, 20 bp, Artificial Sequence
  Description of Artificial Sequence: Synthetic oligonucleotide
  Target: COL7A1; (-) strand; PAM type: YTN; PAM sequence: CTG
actcaggctccaagaatagc

SEQ ID NO: 28604 - DNA, 20 bp, Artificial Sequence
  Description of Artificial Sequence: Synthetic oligonucleotide
  Target: COL7A1; (-) strand; PAM type: YTN; PAM sequence: CTC
cgctgactcaggctccaaga

SEQ ID NO: 28605 - DNA, 20 bp, Artificial Sequence
  Description of Artificial Sequence: Synthetic oligonucleotide
  Target: COL7A1; (-) strand; PAM type: YTN; PAM sequence: TTG
cctccgctgactcaggctcc

SEQ ID NO: 28606 - DNA, 20 bp, Artificial Sequence
  Description of Artificial Sequence: Synthetic oligonucleotide
  Target: COL7A1; (-) strand; PAM type: YTN; PAM sequence: TTT
gcctccgctgactcaggctc

SEQ ID NO: 28607 - DNA, 20 bp, Artificial Sequence
  Description of Artificial Sequence: Synthetic oligonucleotide
  Target: COL7A1; (-) strand; PAM type: YTN; PAM sequence: CTT
tgcctccgctgactcaggct

SEQ ID NO: 28608 - DNA, 20 bp, Artificial Sequence
  Description of Artificial Sequence: Synthetic oligonucleotide
  Target: COL7A1; (-) strand; PAM type: YTN; PAM sequence: CTG
gacaagcagggcaggaatcc

SEQ ID NO: 28609 - DNA, 20 bp, Artificial Sequence
  Description of Artificial Sequence: Synthetic oligonucleotide
  Target: COL7A1; (-) strand; PAM type: YTN; PAM sequence: CTG
cctggacaagcagggcagga

SEQ ID NO: 28610 - DNA, 20 bp, Artificial Sequence
  Description of Artificial Sequence: Synthetic oligonucleotide
  Target: COL7A1; (-) strand; PAM type: YTN; PAM sequence: CTG
ctgcctggacaagcagggca

SEQ ID NO: 28611 - DNA, 20 bp, Artificial Sequence
  Description of Artificial Sequence: Synthetic oligonucleotide
  Target: COL7A1; (-) strand; PAM type: YTN; PAM sequence: CTA
actgctgcctggacaagcag

SEQ ID NO: 28612 - DNA, 20 bp, Artificial Sequence
  Description of Artificial Sequence: Synthetic oligonucleotide
  Target: COL7A1; (-) strand; PAM type: YTN; PAM sequence: TTC
taactgctgcctggacaagc

SEQ ID NO: 28613 - DNA, 20 bp, Artificial Sequence
  Description of Artificial Sequence: Synthetic oligonucleotide
  Target: COL7A1; (-) strand; PAM type: YTN; PAM sequence: TTT
ctaactgctgcctggacaag

SEQ ID NO: 28614 - DNA, 20 bp, Artificial Sequence
  Description of Artificial Sequence: Synthetic oligonucleotide
  Target: COL7A1; (-) strand; PAM type: YTN; PAM sequence: TTG
gtttctaactgctgcctgga

SEQ ID NO: 28615 - DNA, 20 bp, Artificial Sequence
  Description of Artificial Sequence: Synthetic oligonucleotide
  Target: COL7A1; (-) strand; PAM type: YTN; PAM sequence: TTT
ggtttctaactgctgcctgg

SEQ ID NO: 28616 - DNA, 20 bp, Artificial Sequence
  Description of Artificial Sequence: Synthetic oligonucleotide
  Target: COL7A1; (-) strand; PAM type: YTN; PAM sequence: CTC
atttggtttctaactgctgc

SEQ ID NO: 28617 - DNA, 20 bp, Artificial Sequence
  Description of Artificial Sequence: Synthetic oligonucleotide
  Target: COL7A1; (-) strand; PAM type: YTN; PAM sequence: TTC
tcatttggtttctaactgct

SEQ ID NO: 28618 - DNA, 20 bp, Artificial Sequence
  Description of Artificial Sequence: Synthetic oligonucleotide
  Target: COL7A1; (-) strand; PAM type: YTN; PAM sequence: CTG
gggcatagtgttctcatttg

SEQ ID NO: 28619 - DNA, 20 bp, Artificial Sequence
  Description of Artificial Sequence: Synthetic oligonucleotide
  Target: COL7A1; (-) strand; PAM type: YTN; PAM sequence: CTG
ggaggaggatagcctggggc

SEQ ID NO: 28620 - DNA, 20 bp, Artificial Sequence
  Description of Artificial Sequence: Synthetic oligonucleotide
  Target: COL7A1; (-) strand; PAM type: YTN; PAM sequence: TTC
tgggaggaggatagcctggg

SEQ ID NO: 28621 - DNA, 20 bp, Artificial Sequence
  Description of Artificial Sequence: Synthetic oligonucleotide
  Target: COL7A1; (-) strand; PAM type: YTN; PAM sequence: CTG
cattctgggaggaggatagc

SEQ ID NO: 28622 - DNA, 20 bp, Artificial Sequence
  Description of Artificial Sequence: Synthetic oligonucleotide
  Target: COL7A1; (-) strand; PAM type: YTN; PAM sequence: CTC
tgcattctgggaggaggata

SEQ ID NO: 28623 - DNA, 20 bp, Artificial Sequence
  Description of Artificial Sequence: Synthetic oligonucleotide
  Target: COL7A1; (-) strand; PAM type: YTN; PAM sequence: TTA
ctctgcattctgggaggagg

SEQ ID NO: 28624 - DNA, 20 bp, Artificial Sequence
  Description of Artificial Sequence: Synthetic oligonucleotide
  Target: COL7A1; (-) strand; PAM type: YTN; PAM sequence: TTT
actctgcattctgggaggag

SEQ ID NO: 28625 - DNA, 20 bp, Artificial Sequence
  Description of Artificial Sequence: Synthetic oligonucleotide
  Target: COL7A1; (-) strand; PAM type: YTN; PAM sequence: TTG
tgtgtgtttactctgcattc

SEQ ID NO: 28626 - DNA, 20 bp, Artificial Sequence
  Description of Artificial Sequence: Synthetic oligonucleotide
  Target: COL7A1; (-) strand; PAM type: YTN; PAM sequence: CTT
gtgtgtgtttactctgcatt

SEQ ID NO: 28627 - DNA, 20 bp, Artificial Sequence
  Description of Artificial Sequence: Synthetic oligonucleotide
  Target: COL7A1; (-) strand; PAM type: YTN; PAM sequence: CTC
ttgtgtgtgtttactctgca

SEQ ID NO: 28628 - DNA, 20 bp, Artificial Sequence
  Description of Artificial Sequence: Synthetic oligonucleotide
  Target: COL7A1; (-) strand; PAM type: YTN; PAM sequence: CTC
caaggatgcctcttgtgtgt

SEQ ID NO: 28629 - DNA, 20 bp, Artificial Sequence
  Description of Artificial Sequence: Synthetic oligonucleotide
  Target: COL7A1; (-) strand; PAM type: YTN; PAM sequence: CTG
gtggaccagaaggggccaag

SEQ ID NO: 28630 - DNA, 20 bp, Artificial Sequence
  Description of Artificial Sequence: Synthetic oligonucleotide
  Target: COL7A1; (-) strand; PAM type: YTN; PAM sequence: CTG
gtggtccctggtggaccaga

SEQ ID NO: 28631 - DNA, 20 bp, Artificial Sequence
  Description of Artificial Sequence: Synthetic oligonucleotide
  Target: COL7A1; (-) strand; PAM type: YTN; PAM sequence: TTG
tgccaagtcaccccctggtg

SEQ ID NO: 28632 - DNA, 20 bp, Artificial Sequence
  Description of Artificial Sequence: Synthetic oligonucleotide
  Target: COL7A1; (-) strand; PAM type: YTN; PAM sequence: CTT
gtgccaagtcaccccctggt

SEQ ID NO: 28633 - DNA, 20 bp, Artificial Sequence
  Description of Artificial Sequence: Synthetic oligonucleotide
  Target: COL7A1; (-) strand; PAM type: YTN; PAM sequence: CTG
tggaccttgtgccaagtcac

SEQ ID NO: 28634 - DNA, 20 bp, Artificial Sequence
  Description of Artificial Sequence: Synthetic oligonucleotide
  Target: COL7A1; (-) strand; PAM type: YTN; PAM sequence: CTC
actgtggaccttgtgccaag

SEQ ID NO: 28635 - DNA, 20 bp, Artificial Sequence
  Description of Artificial Sequence: Synthetic oligonucleotide
  Target: COL7A1; (-) strand; PAM type: YTN; PAM sequence: CTC
aggtgggaaacccctcactg

SEQ ID NO: 28636 - DNA, 20 bp, Artificial Sequence
  Description of Artificial Sequence: Synthetic oligonucleotide
  Target: COL7A1; (-) strand; PAM type: YTN; PAM sequence: CTG
caggctcaggtgggaaaccc

SEQ ID NO: 28637 - DNA, 20 bp, Artificial Sequence
  Description of Artificial Sequence: Synthetic oligonucleotide
  Target: COL7A1; (-) strand; PAM type: YTN; PAM sequence: CTG
gaatccctgcaggctcaggt

SEQ ID NO: 28638 - DNA, 20 bp, Artificial Sequence
  Description of Artificial Sequence: Synthetic oligonucleotide
  Target: COL7A1; (-) strand; PAM type: YTN; PAM sequence: CTG
taggagtcccagcctggaat

SEQ ID NO: 28639 - DNA, 20 bp, Artificial Sequence
  Description of Artificial Sequence: Synthetic oligonucleotide
  Target: COL7A1; (-) strand; PAM type: YTN; PAM sequence: TTG
cccctgtaggagtcccagcc

SEQ ID NO: 28640 - DNA, 20 bp, Artificial Sequence
  Description of Artificial Sequence: Synthetic oligonucleotide
  Target: COL7A1; (-) strand; PAM type: YTN; PAM sequence: TTT
gcccctgtaggagtcccagc

SEQ ID NO: 28641 - DNA, 20 bp, Artificial Sequence
  Description of Artificial Sequence: Synthetic oligonucleotide
  Target: COL7A1; (-) strand; PAM type: YTN; PAM sequence: CTT
tgcccctgtaggagtcccag

SEQ ID NO: 28642 - DNA, 20 bp, Artificial Sequence
  Description of Artificial Sequence: Synthetic oligonucleotide
  Target: COL7A1; (-) strand; PAM type: YTN; PAM sequence: CTG
tgggagtccataggaagtgt

SEQ ID NO: 28643 - DNA, 20 bp, Artificial Sequence
  Description of Artificial Sequence: Synthetic oligonucleotide
  Target: COL7A1; (-) strand; PAM type: YTN; PAM sequence: TTG
ggctgtgggagtccatagga

SEQ ID NO: 28644 - DNA, 20 bp, Artificial Sequence
  Description of Artificial Sequence: Synthetic oligonucleotide
  Target: COL7A1; (-) strand; PAM type: YTN; PAM sequence: CTG
gtcccaagattgggctgtgg

SEQ ID NO: 28645 - DNA, 20 bp, Artificial Sequence
  Description of Artificial Sequence: Synthetic oligonucleotide
  Target: COL7A1; (-) strand; PAM type: YTN; PAM sequence: CTC
agccagctggtcccaagatt

SEQ ID NO: 28646 - DNA, 20 bp, Artificial Sequence
  Description of Artificial Sequence: Synthetic oligonucleotide
  Target: COL7A1; (-) strand; PAM type: YTN; PAM sequence: TTC
ctcagccagctggtcccaag

SEQ ID NO: 28647 - DNA, 20 bp, Artificial Sequence
  Description of Artificial Sequence: Synthetic oligonucleotide
  Target: COL7A1; (-) strand; PAM type: YTN; PAM sequence: TTA
ggggagttcctcagccagct

SEQ ID NO: 28648 - DNA, 20 bp, Artificial Sequence
  Description of Artificial Sequence: Synthetic oligonucleotide
  Target: COL7A1; (-) strand; PAM type: YTN; PAM sequence: CTT
aggggagttcctcagccagc

SEQ ID NO: 28649 - DNA, 20 bp, Artificial Sequence
  Description of Artificial Sequence: Synthetic oligonucleotide
  Target: COL7A1; (-) strand; PAM type: YTN; PAM sequence: CTC
agccacttaggggagttcct

SEQ ID NO: 28650 - DNA, 20 bp, Artificial Sequence
  Description of Artificial Sequence: Synthetic oligonucleotide
  Target: COL7A1; (-) strand; PAM type: YTN; PAM sequence: TTC
cactcagccacttaggggag

SEQ ID NO: 28651 - DNA, 20 bp, Artificial Sequence
  Description of Artificial Sequence: Synthetic oligonucleotide
  Target: COL7A1; (-) strand; PAM type: YTN; PAM sequence: TTT
ccactcagccacttagggga

SEQ ID NO: 28652 - DNA, 20 bp, Artificial Sequence
  Description of Artificial Sequence: Synthetic oligonucleotide
  Target: COL7A1; (-) strand; PAM type: YTN; PAM sequence: CTG
agcccagatgtttccactca

SEQ ID NO: 28653 - DNA, 20 bp, Artificial Sequence
  Description of Artificial Sequence: Synthetic oligonucleotide
  Target: COL7A1; (-) strand; PAM type: YTN; PAM sequence: CTA
cagggagctgagcccagatg

SEQ ID NO: 28654 - DNA, 20 bp, Artificial Sequence
  Description of Artificial Sequence: Synthetic oligonucleotide
  Target: COL7A1; (-) strand; PAM type: YTN; PAM sequence: TTG
atgcctacagggagctgagc

SEQ ID NO: 28655 - DNA, 20 bp, Artificial Sequence
  Description of Artificial Sequence: Synthetic oligonucleotide
  Target: COL7A1; (-) strand; PAM type: YTN; PAM sequence: TTT
gatgcctacagggagctgag

SEQ ID NO: 28656 - DNA, 20 bp, Artificial Sequence
  Description of Artificial Sequence: Synthetic oligonucleotide
  Target: COL7A1; (-) strand; PAM type: YTN; PAM sequence: CTT
tgatgcctacagggagctga

SEQ ID NO: 28657 - DNA, 20 bp, Artificial Sequence
  Description of Artificial Sequence: Synthetic oligonucleotide
  Target: COL7A1; (-) strand; PAM type: YTN; PAM sequence: CTG
aggccggaagtctttgatgc

SEQ ID NO: 28658 - DNA, 20 bp, Artificial Sequence
  Description of Artificial Sequence: Synthetic oligonucleotide
  Target: COL7A1; (-) strand; PAM type: YTN; PAM sequence: TTG
cagctgaggccggaagtctt

SEQ ID NO: 28659 - DNA, 20 bp, Artificial Sequence
  Description of Artificial Sequence: Synthetic oligonucleotide
  Target: COL7A1; (-) strand; PAM type: YTN; PAM sequence: CTC
agccaggggcaagcgtgggg

SEQ ID NO: 28660 - DNA, 20 bp, Artificial Sequence
  Description of Artificial Sequence: Synthetic oligonucleotide
  Target: COL7A1; (-) strand; PAM type: YTN; PAM sequence: CTG
atgtgtcctcagccaggggc

SEQ ID NO: 28661 - DNA, 20 bp, Artificial Sequence
  Description of Artificial Sequence: Synthetic oligonucleotide
  Target: COL7A1; (-) strand; PAM type: YTN; PAM sequence: TTC
ccacaggctgatgtgtcctc

SEQ ID NO: 28662 - DNA, 20 bp, Artificial Sequence
  Description of Artificial Sequence: Synthetic oligonucleotide
  Target: COL7A1; (-) strand; PAM type: YTN; PAM sequence: CTT
cccacaggctgatgtgtcct

SEQ ID NO: 28663 - DNA, 20 bp, Artificial Sequence
  Description of Artificial Sequence: Synthetic oligonucleotide
  Target: COL7A1; (-) strand; PAM type: YTN; PAM sequence: CTG
ccttcccacaggctgatgtg

SEQ ID NO: 28664 - DNA, 20 bp, Artificial Sequence
  Description of Artificial Sequence: Synthetic oligonucleotide
  Target: COL7A1; (-) strand; PAM type: YTN; PAM sequence: CTC
ctgccttcccacaggctgat

SEQ ID NO: 28665 - DNA, 20 bp, Artificial Sequence
  Description of Artificial Sequence: Synthetic oligonucleotide
  Target: COL7A1; (-) strand; PAM type: YTN; PAM sequence: CTG
gatcctcctgccttcccaca

SEQ ID NO: 28666 - DNA, 20 bp, Artificial Sequence
  Description of Artificial Sequence: Synthetic oligonucleotide
  Target: COL7A1; (-) strand; PAM type: YTN; PAM sequence: CTC
ctggatcctcctgccttccc

SEQ ID NO: 28667 - DNA, 20 bp, Artificial Sequence
  Description of Artificial Sequence: Synthetic oligonucleotide
  Target: COL7A1; (-) strand; PAM type: YTN; PAM sequence: CTG
tggctcctggatcctcctgc

SEQ ID NO: 28668 - DNA, 20 bp, Artificial Sequence
  Description of Artificial Sequence: Synthetic oligonucleotide
  Target: COL7A1; (-) strand; PAM type: YTN; PAM sequence: TTC
tgtggctcctggatcctcct

SEQ ID NO: 28669 - DNA, 20 bp, Artificial Sequence
  Description of Artificial Sequence: Synthetic oligonucleotide
  Target: COL7A1; (-) strand; PAM type: YTN; PAM sequence: CTA
gttctgtggctcctggatcc

SEQ ID NO: 28670 - DNA, 20 bp, Artificial Sequence
  Description of Artificial Sequence: Synthetic oligonucleotide
  Target: COL7A1; (-) strand; PAM type: YTN; PAM sequence: CTC
tagttctgtggctcctggat

SEQ ID NO: 28671 - DNA, 20 bp, Artificial Sequence
  Description of Artificial Sequence: Synthetic oligonucleotide
  Target: COL7A1; (-) strand; PAM type: YTN; PAM sequence: TTC
cctctagttctgtggctcct

SEQ ID NO: 28672 - DNA, 20 bp, Artificial Sequence
  Description of Artificial Sequence: Synthetic oligonucleotide
  Target: COL7A1; (-) strand; PAM type: YTN; PAM sequence: CTT
ccctctagttctgtggctcc

SEQ ID NO: 28673 - DNA, 20 bp, Artificial Sequence
  Description of Artificial Sequence: Synthetic oligonucleotide
  Target: COL7A1; (-) strand; PAM type: YTN; PAM sequence: TTG
gcatggagtccatggggcag

SEQ ID NO: 28674 - DNA, 20 bp, Artificial Sequence
  Description of Artificial Sequence: Synthetic oligonucleotide
  Target: COL7A1; (-) strand; PAM type: YTN; PAM sequence: TTG
gcattggcatggagtccatg

SEQ ID NO: 28675 - DNA, 20 bp, Artificial Sequence
  Description of Artificial Sequence: Synthetic oligonucleotide
  Target: COL7A1; (-) strand; PAM type: YTN; PAM sequence: TTT
ggcattggcatggagtccat

SEQ ID NO: 28676 - DNA, 20 bp, Artificial Sequence
  Description of Artificial Sequence: Synthetic oligonucleotide
  Target: COL7A1; (-) strand; PAM type: YTN; PAM sequence: TTT
tggcattggcatggagtcca

SEQ ID NO: 28677 - DNA, 20 bp, Artificial Sequence
  Description of Artificial Sequence: Synthetic oligonucleotide
  Target: COL7A1; (-) strand; PAM type: YTN; PAM sequence: CTT
ttggcattggcatggagtcc

SEQ ID NO: 28678 - DNA, 20 bp, Artificial Sequence
  Description of Artificial Sequence: Synthetic oligonucleotide
  Target: COL7A1; (-) strand; PAM type: YTN; PAM sequence: CTC
ttttggcattggcatggagt

SEQ ID NO: 28679 - DNA, 20 bp, Artificial Sequence
  Description of Artificial Sequence: Synthetic oligonucleotide
  Target: COL7A1; (-) strand; PAM type: YTN; PAM sequence: CTG
agaagtgtgtcatccctctt

SEQ ID NO: 28680 - DNA, 20 bp, Artificial Sequence
  Description of Artificial Sequence: Synthetic oligonucleotide
  Target: COL7A1; (-) strand; PAM type: YTN; PAM sequence: CTG
ctgagaagtgtgtcatccct

SEQ ID NO: 28681 - DNA, 20 bp, Artificial Sequence
  Description of Artificial Sequence: Synthetic oligonucleotide
  Target: COL7A1; (-) strand; PAM type: YTN; PAM sequence: CTC
tgctgagaagtgtgtcatcc

SEQ ID NO: 28682 - DNA, 20 bp, Artificial Sequence
  Description of Artificial Sequence: Synthetic oligonucleotide
  Target: COL7A1; (-) strand; PAM type: YTN; PAM sequence: CTG
tgccacaggtgaccaccaat

SEQ ID NO: 28683 - DNA, 20 bp, Artificial Sequence
  Description of Artificial Sequence: Synthetic oligonucleotide
  Target: COL7A1; (-) strand; PAM type: YTN; PAM sequence: CTA
acctgtgccacaggtgacca

SEQ ID NO: 28684 - DNA, 20 bp, Artificial Sequence
  Description of Artificial Sequence: Synthetic oligonucleotide
  Target: COL7A1; (-) strand; PAM type: YTN; PAM sequence: CTC
taacctgtgccacaggtgac

SEQ ID NO: 28685 - DNA, 20 bp, Artificial Sequence
  Description of Artificial Sequence: Synthetic oligonucleotide
  Target: COL7A1; (-) strand; PAM type: YTN; PAM sequence: CTC
ctctaacctgtgccacaggt

SEQ ID NO: 28686 - DNA, 20 bp, Artificial Sequence
  Description of Artificial Sequence: Synthetic oligonucleotide
  Target: COL7A1; (-) strand; PAM type: YTN; PAM sequence: TTC
ggctcctctaacctgtgcca

SEQ ID NO: 28687 - DNA, 20 bp, Artificial Sequence
  Description of Artificial Sequence: Synthetic oligonucleotide
  Target: COL7A1; (-) strand; PAM type: YTN; PAM sequence: CTT
cggctcctctaacctgtgcc

SEQ ID NO: 28688 - DNA, 20 bp, Artificial Sequence
  Description of Artificial Sequence: Synthetic oligonucleotide
  Target: COL7A1; (-) strand; PAM type: YTN; PAM sequence: TTG
tggtcccccccccaccacaa

SEQ ID NO: 28689 - DNA, 20 bp, Artificial Sequence
  Description of Artificial Sequence: Synthetic oligonucleotide
  Target: COL7A1; (-) strand; PAM type: YTN; PAM sequence: TTT
gtggtcccccccccaccaca

SEQ ID NO: 28690 - DNA, 20 bp, Artificial Sequence
  Description of Artificial Sequence: Synthetic oligonucleotide
  Target: COL7A1; (-) strand; PAM type: YTN; PAM sequence: CTA
tgtaagcaagagggcagggc

SEQ ID NO: 28691 - DNA, 20 bp, Artificial Sequence
  Description of Artificial Sequence: Synthetic oligonucleotide
  Target: COL7A1; (-) strand; PAM type: YTN; PAM sequence: CTA
ggcgggaagcctatgtaagc

SEQ ID NO: 28692 - DNA, 20 bp, Artificial Sequence
  Description of Artificial Sequence: Synthetic oligonucleotide
  Target: COL7A1; (-) strand; PAM type: YTN; PAM sequence: TTC
taggcgggaagcctatgtaa

SEQ ID NO: 28693 - DNA, 20 bp, Artificial Sequence
  Description of Artificial Sequence: Synthetic oligonucleotide
  Target: COL7A1; (-) strand; PAM type: YTN; PAM sequence: CTT
ctaggcgggaagcctatgta

SEQ ID NO: 28694 - DNA, 20 bp, Artificial Sequence
  Description of Artificial Sequence: Synthetic oligonucleotide
  Target: COL7A1; (-) strand; PAM type: YTN; PAM sequence: CTG
cgcttctaggcgggaagcct

SEQ ID NO: 28695 - DNA, 20 bp, Artificial Sequence
  Description of Artificial Sequence: Synthetic oligonucleotide
  Target: COL7A1; (-) strand; PAM type: YTN; PAM sequence: CTG
gctgcgcttctaggcgggaa

SEQ ID NO: 28696 - DNA, 20 bp, Artificial Sequence
  Description of Artificial Sequence: Synthetic oligonucleotide
  Target: COL7A1; (-) strand; PAM type: YTN; PAM sequence: TTC
tggctgcgcttctaggcggg

SEQ ID NO: 28697 - DNA, 20 bp, Artificial Sequence
  Description of Artificial Sequence: Synthetic oligonucleotide
  Target: COL7A1; (-) strand; PAM type: YTN; PAM sequence: CTA
caaccggatccgtagcggca

SEQ ID NO: 28698 - DNA, 20 bp, Artificial Sequence
  Description of Artificial Sequence: Synthetic oligonucleotide
  Target: COL7A1; (-) strand; PAM type: YTN; PAM sequence: CTC
ccagactacaaccggatccg

SEQ ID NO: 28699 - DNA, 20 bp, Artificial Sequence
  Description of Artificial Sequence: Synthetic oligonucleotide
  Target: COL7A1; (-) strand; PAM type: YTN; PAM sequence: TTG
agcagctcccagactacaac

SEQ ID NO: 28700 - DNA, 20 bp, Artificial Sequence
  Description of Artificial Sequence: Synthetic oligonucleotide
  Target: COL7A1; (-) strand; PAM type: YTN; PAM sequence: CTA
tccccacaggccccattgag

SEQ ID NO: 28701 - DNA, 20 bp, Artificial Sequence
  Description of Artificial Sequence: Synthetic oligonucleotide
  Target: COL7A1; (-) strand; PAM type: YTN; PAM sequence: CTC
caccctatccccacaggccc

SEQ ID NO: 28702 - DNA, 20 bp, Artificial Sequence
  Description of Artificial Sequence: Synthetic oligonucleotide
  Target: COL7A1; (-) strand; PAM type: YTN; PAM sequence: CTG
acgctccaccctatccccac

SEQ ID NO: 28703 - DNA, 20 bp, Artificial Sequence
  Description of Artificial Sequence: Synthetic oligonucleotide
  Target: COL7A1; (-) strand; PAM type: YTN; PAM sequence: CTG
tgcaggccaggtaccccacc

SEQ ID NO: 28704 - DNA, 20 bp, Artificial Sequence
  Description of Artificial Sequence: Synthetic oligonucleotide
  Target: COL7A1; (-) strand; PAM type: YTN; PAM sequence: CTG
ggtgcggcacagggccaggt

SEQ ID NO: 28705 - DNA, 20 bp, Artificial Sequence
  Description of Artificial Sequence: Synthetic oligonucleotide
  Target: COL7A1; (-) strand; PAM type: YTN; PAM sequence: CTC
cgagctgggtgcggcacagg

SEQ ID NO: 28706 - DNA, 20 bp, Artificial Sequence
  Description of Artificial Sequence: Synthetic oligonucleotide
  Target: COL7A1; (-) strand; PAM type: YTN; PAM sequence: CTG
ggcagcatctccgagctggg

SEQ ID NO: 28707 - DNA, 20 bp, Artificial Sequence
  Description of Artificial Sequence: Synthetic oligonucleotide
  Target: COL7A1; (-) strand; PAM type: YTN; PAM sequence: CTC
tgggcagcatctccgagctg

SEQ ID NO: 28708 - DNA, 20 bp, Artificial Sequence
  Description of Artificial Sequence: Synthetic oligonucleotide
  Target: COL7A1; (-) strand; PAM type: YTN; PAM sequence: CTG
ctctgggcagcatctccgag

SEQ ID NO: 28709 - DNA, 20 bp, Artificial Sequence
  Description of Artificial Sequence: Synthetic oligonucleotide
  Target: COL7A1; (-) strand; PAM type: YTN; PAM sequence: TTG
tgctgctctgggcagcatct

SEQ ID NO: 28710 - DNA, 20 bp, Artificial Sequence
  Description of Artificial Sequence: Synthetic oligonucleotide
  Target: COL7A1; (-) strand; PAM type: YTN; PAM sequence: CTT
gtgctgctctgggcagcatc

SEQ ID NO: 28711 - DNA, 20 bp, Artificial Sequence
  Description of Artificial Sequence: Synthetic oligonucleotide
  Target: COL7A1; (-) strand; PAM type: YTN; PAM sequence: CTG
tcttgtgctgctctgggcag

SEQ ID NO: 28712 - DNA, 20 bp, Artificial Sequence
  Description of Artificial Sequence: Synthetic oligonucleotide
  Target: COL7A1; (-) strand; PAM type: YTN; PAM sequence: CTC
aaagcctgtcttgtgctgct

SEQ ID NO: 28713 - DNA, 20 bp, Artificial Sequence
  Description of Artificial Sequence: Synthetic oligonucleotide
  Target: COL7A1; (-) strand; PAM type: YTN; PAM sequence: TTC
cactcaaagcctgtcttgtg

SEQ ID NO: 28714 - DNA, 20 bp, Artificial Sequence
  Description of Artificial Sequence: Synthetic oligonucleotide
  Target: COL7A1; (-) strand; PAM type: YTN; PAM sequence: TTT
ccactcaaagcctgtcttgt

SEQ ID NO: 28715 - DNA, 20 bp, Artificial Sequence
  Description of Artificial Sequence: Synthetic oligonucleotide
  Target: COL7A1; (-) strand; PAM type: YTN; PAM sequence: CTT
tccactcaaagcctgtcttg

SEQ ID NO: 28716 - DNA, 20 bp, Artificial Sequence
  Description of Artificial Sequence: Synthetic oligonucleotide
  Target: COL7A1; (-) strand; PAM type: YTN; PAM sequence: CTC
tttccactcaaagcctgtct

SEQ ID NO: 28717 - DNA, 20 bp, Artificial Sequence
  Description of Artificial Sequence: Synthetic oligonucleotide
  Target: COL7A1; (-) strand; PAM type: YTN; PAM sequence: CTC
tctttccactcaaagcctgt

SEQ ID NO: 28718 - DNA, 20 bp, Artificial Sequence
  Description of Artificial Sequence: Synthetic oligonucleotide
  Target: COL7A1; (-) strand; PAM type: YTN; PAM sequence: CTC
ctctctttccactcaaagcc

SEQ ID NO: 28719 - DNA, 20 bp, Artificial Sequence
  Description of Artificial Sequence: Synthetic oligonucleotide
  Target: COL7A1; (-) strand; PAM type: YTN; PAM sequence: CTC
tcctctctttccactcaaag

SEQ ID NO: 28720 - DNA, 20 bp, Artificial Sequence
  Description of Artificial Sequence: Synthetic oligonucleotide
  Target: COL7A1; (-) strand; PAM type: YTN; PAM sequence: TTC
tctcctctctttccactcaa

SEQ ID NO: 28721 - DNA, 20 bp, Artificial Sequence
  Description of Artificial Sequence: Synthetic oligonucleotide
  Target: COL7A1; (-) strand; PAM type: YTN; PAM sequence: CTG
ggggaatgttctctcctctc

SEQ ID NO: 28722 - DNA, 20 bp, Artificial Sequence
  Description of Artificial Sequence: Synthetic oligonucleotide
  Target: COL7A1; (-) strand; PAM type: YTN; PAM sequence: CTC
agcacccctgggggaatgtt

SEQ ID NO: 28723 - DNA, 20 bp, Artificial Sequence
  Description of Artificial Sequence: Synthetic oligonucleotide
  Target: COL7A1; (-) strand; PAM type: YTN; PAM sequence: TTC
aagggccagaacatgaaggg

SEQ ID NO: 28724 - DNA, 20 bp, Artificial Sequence
  Description of Artificial Sequence: Synthetic oligonucleotide
  Target: COL7A1; (-) strand; PAM type: YTN; PAM sequence: CTT
caagggccagaacatgaagg

SEQ ID NO: 28725 - DNA, 20 bp, Artificial Sequence
  Description of Artificial Sequence: Synthetic oligonucleotide
  Target: COL7A1; (-) strand; PAM type: YTN; PAM sequence: CTC
catgtggggtggggcttcaa

SEQ ID NO: 28726 - DNA, 20 bp, Artificial Sequence
  Description of Artificial Sequence: Synthetic oligonucleotide
  Target: COL7A1; (-) strand; PAM type: YTN; PAM sequence: CTG
cacccgtcaggtaacgggca

SEQ ID NO: 28727 - DNA, 20 bp, Artificial Sequence
  Description of Artificial Sequence: Synthetic oligonucleotide
  Target: COL7A1; (-) strand; PAM type: YTN; PAM sequence: TTC
atcaataccctgcacccgtc

SEQ ID NO: 28728 - DNA, 20 bp, Artificial Sequence
  Description of Artificial Sequence: Synthetic oligonucleotide
  Target: COL7A1; (-) strand; PAM type: YTN; PAM sequence: CTT
catcaataccctgcacccgt

SEQ ID NO: 28729 - DNA, 20 bp, Artificial Sequence
  Description of Artificial Sequence: Synthetic oligonucleotide
  Target: COL7A1; (-) strand; PAM type: YTN; PAM sequence: CTG
ccaaggtgccttcatcaata

SEQ ID NO: 28730 - DNA, 20 bp, Artificial Sequence
  Description of Artificial Sequence: Synthetic oligonucleotide
  Target: COL7A1; (-) strand; PAM type: YTN; PAM sequence: CTG
cctgccaaggtgccttcatc

SEQ ID NO: 28731 - DNA, 20 bp, Artificial Sequence
  Description of Artificial Sequence: Synthetic oligonucleotide
  Target: COL7A1; (-) strand; PAM type: YTN; PAM sequence: TTG
actgcctgccaaggtgcctt

SEQ ID NO: 28732 - DNA, 20 bp, Artificial Sequence
  Description of Artificial Sequence: Synthetic oligonucleotide
  Target: COL7A1; (-) strand; PAM type: YTN; PAM sequence: CTT
gactgcctgccaaggtgcct

SEQ ID NO: 28733 - DNA, 20 bp, Artificial Sequence
  Description of Artificial Sequence: Synthetic oligonucleotide
  Target: COL7A1; (-) strand; PAM type: YTN; PAM sequence: TTC
cttgactgcctgccaaggtg

SEQ ID NO: 28734 - DNA, 20 bp, Artificial Sequence
  Description of Artificial Sequence: Synthetic oligonucleotide
  Target: COL7A1; (-) strand; PAM type: YTN; PAM sequence: CTG
tcccagcagttccttgactg

SEQ ID NO: 28735 - DNA, 20 bp, Artificial Sequence
  Description of Artificial Sequence: Synthetic oligonucleotide
  Target: COL7A1; (-) strand; PAM type: YTN; PAM sequence: CTC
agaaaacctgtcccagcagt

SEQ ID NO: 28736 - DNA, 20 bp, Artificial Sequence
  Description of Artificial Sequence: Synthetic oligonucleotide
  Target: COL7A1; (-) strand; PAM type: YTN; PAM sequence: TTG
ctcagaaaacctgtcccagc

SEQ ID NO: 28737 - DNA, 20 bp, Artificial Sequence
  Description of Artificial Sequence: Synthetic oligonucleotide
  Target: COL7A1; (-) strand; PAM type: YTN; PAM sequence: CTT
gctcagaaaacctgtcccag

SEQ ID NO: 28738 - DNA, 20 bp, Artificial Sequence
  Description of Artificial Sequence: Synthetic oligonucleotide
  Target: COL7A1; (-) strand; PAM type: YTN; PAM sequence: TTC
ttgctcagaaaacctgtccc

SEQ ID NO: 28739 - DNA, 20 bp, Artificial Sequence
  Description of Artificial Sequence: Synthetic oligonucleotide
  Target: COL7A1; (-) strand; PAM type: YTN; PAM sequence: CTG
ccagggagttcttgctcaga

SEQ ID NO: 28740 - DNA, 20 bp, Artificial Sequence
  Description of Artificial Sequence: Synthetic oligonucleotide
  Target: COL7A1; (-) strand; PAM type: YTN; PAM sequence: CTG
gctgccagggagttcttgct

SEQ ID NO: 28741 - DNA, 20 bp, Artificial Sequence
  Description of Artificial Sequence: Synthetic oligonucleotide
  Target: COL7A1; (-) strand; PAM type: YTN; PAM sequence: CTC
cccagtcccctggctgccag

SEQ ID NO: 28742 - DNA, 20 bp, Artificial Sequence
  Description of Artificial Sequence: Synthetic oligonucleotide
  Target: COL7A1; (-) strand; PAM type: YTN; PAM sequence: CTC
tccccagtcccctggctgcc

SEQ ID NO: 28743 - DNA, 20 bp, Artificial Sequence
  Description of Artificial Sequence: Synthetic oligonucleotide
  Target: COL7A1; (-) strand; PAM type: YTN; PAM sequence: TTA
aggccccaagcagctctccc

SEQ ID NO: 28744 - DNA, 20 bp, Artificial Sequence
  Description of Artificial Sequence: Synthetic oligonucleotide
  Target: COL7A1; (-) strand; PAM type: YTN; PAM sequence: TTA
cagagcagccagttaaggcc

SEQ ID NO: 28745 - DNA, 20 bp, Artificial Sequence
  Description of Artificial Sequence: Synthetic oligonucleotide
  Target: COL7A1; (-) strand; PAM type: YTN; PAM sequence: CTT
acagagcagccagttaaggc

SEQ ID NO: 28746 - DNA, 20 bp, Artificial Sequence
  Description of Artificial Sequence: Synthetic oligonucleotide
  Target: COL7A1; (-) strand; PAM type: YTN; PAM sequence: CTC
agcttacagagcagccagtt

SEQ ID NO: 28747 - DNA, 20 bp, Artificial Sequence
  Description of Artificial Sequence: Synthetic oligonucleotide
  Target: COL7A1; (-) strand; PAM type: YTN; PAM sequence: CTG
ctcagcttacagagcagcca

SEQ ID NO: 28748 - DNA, 20 bp, Artificial Sequence
  Description of Artificial Sequence: Synthetic oligonucleotide
  Target: COL7A1; (-) strand; PAM type: YTN; PAM sequence: CTG
ctgctcagcttacagagcag

SEQ ID NO: 28749 - DNA, 20 bp, Artificial Sequence
  Description of Artificial Sequence: Synthetic oligonucleotide
  Target: COL7A1; (-) strand; PAM type: YTN; PAM sequence: CTC
ccgcactgctgctcagctta

SEQ ID NO: 28750 - DNA, 20 bp, Artificial Sequence
  Description of Artificial Sequence: Synthetic oligonucleotide
  Target: COL7A1; (-) strand; PAM type: YTN; PAM sequence: CTG
ctcccgcactgctgctcagc

SEQ ID NO: 28751 - DNA, 20 bp, Artificial Sequence
  Description of Artificial Sequence: Synthetic oligonucleotide
  Target: COL7A1; (-) strand; PAM type: YTN; PAM sequence: CTC
tgctcccgcactgctgctca

SEQ ID NO: 28752 - DNA, 20 bp, Artificial Sequence
  Description of Artificial Sequence: Synthetic oligonucleotide
  Target: COL7A1; (-) strand; PAM type: YTN; PAM sequence: TTC
cacctctgctcccgcactgc

SEQ ID NO: 28753 - DNA, 20 bp, Artificial Sequence
  Description of Artificial Sequence: Synthetic oligonucleotide
  Target: COL7A1; (-) strand; PAM type: YTN; PAM sequence: CTT
ccacctctgctcccgcactg

SEQ ID NO: 28754 - DNA, 20 bp, Artificial Sequence
  Description of Artificial Sequence: Synthetic oligonucleotide
  Target: COL7A1; (-) strand; PAM type: YTN; PAM sequence: CTC
cccttccacctctgctcccg

SEQ ID NO: 28755 - DNA, 20 bp, Artificial Sequence
  Description of Artificial Sequence: Synthetic oligonucleotide
  Target: COL7A1; (-) strand; PAM type: YTN; PAM sequence: TTG
gcctccccttccacctctgc

SEQ ID NO: 28756 - DNA, 20 bp, Artificial Sequence
  Description of Artificial Sequence: Synthetic oligonucleotide
  Target: COL7A1; (-) strand; PAM type: YTN; PAM sequence: CTT
ggcctccccttccacctctg

SEQ ID NO: 28757 - DNA, 20 bp, Artificial Sequence
  Description of Artificial Sequence: Synthetic oligonucleotide
  Target: COL7A1; (-) strand; PAM type: YTN; PAM sequence: CTC
ttggcctccccttccacctc

SEQ ID NO: 28758 - DNA, 20 bp, Artificial Sequence
  Description of Artificial Sequence: Synthetic oligonucleotide
  Target: COL7A1; (-) strand; PAM type: YTN; PAM sequence: TTC
tcttggcctccccttccacc

SEQ ID NO: 28759 - DNA, 20 bp, Artificial Sequence
  Description of Artificial Sequence: Synthetic oligonucleotide
  Target: COL7A1; (-) strand; PAM type: YTN; PAM sequence: CTC
aggccgttctcttggcctcc

SEQ ID NO: 28760 - DNA, 20 bp, Artificial Sequence
  Description of Artificial Sequence: Synthetic oligonucleotide
  Target: COL7A1; (-) strand; PAM type: YTN; PAM sequence: TTC
ctcaggccgttctcttggcc

SEQ ID NO: 28761 - DNA, 20 bp, Artificial Sequence
  Description of Artificial Sequence: Synthetic oligonucleotide
  Target: COL7A1; (-) strand; PAM type: YTN; PAM sequence: TTT
cctcaggccgttctcttggc

SEQ ID NO: 28762 - DNA, 20 bp, Artificial Sequence
  Description of Artificial Sequence: Synthetic oligonucleotide
  Target: COL7A1; (-) strand; PAM type: YTN; PAM sequence: TTA
tttcctcaggccgttctctt

SEQ ID NO: 28763 - DNA, 20 bp, Artificial Sequence
  Description of Artificial Sequence: Synthetic oligonucleotide
  Target: COL7A1; (-) strand; PAM type: YTN; PAM sequence: TTT
atttcctcaggccgttctct

SEQ ID NO: 28764 - DNA, 20 bp, Artificial Sequence
  Description of Artificial Sequence: Synthetic oligonucleotide
  Target: COL7A1; (-) strand; PAM type: YTN; PAM sequence: TTG
tttatttcctcaggccgttc

SEQ ID NO: 28765 - DNA, 20 bp, Artificial Sequence
  Description of Artificial Sequence: Synthetic oligonucleotide
  Target: COL7A1; (-) strand; PAM type: YTN; PAM sequence: TTT
gtttatttcctcaggccgtt

SEQ ID NO: 28766 - DNA, 20 bp, Artificial Sequence
  Description of Artificial Sequence: Synthetic oligonucleotide
  Target: COL7A1; (-) strand; PAM type: YTN; PAM sequence: CTT
tgtttatttcctcaggccgt

SEQ ID NO: 28767 - DNA, 20 bp, Artificial Sequence
  Description of Artificial Sequence: Synthetic oligonucleotide
  Target: COL7A1; (-) strand; PAM type: YTN; PAM sequence: CTC
tttgtttatttcctcaggcc

SEQ ID NO: 28768 - DNA, 20 bp, Artificial Sequence
  Description of Artificial Sequence: Synthetic oligonucleotide
  Target: COL7A1; (-) strand; PAM type: YTN; PAM sequence: CTG
ctctttgtttatttcctcag

SEQ ID NO: 28769 - DNA, 20 bp, Artificial Sequence
  Description of Artificial Sequence: Synthetic oligonucleotide
  Target: COL7A1; (-) strand; PAM type: YTN; PAM sequence: CTA
gggggtctgctctttgttta

SEQ ID NO: 28770 - DNA, 20 bp, Artificial Sequence
  Description of Artificial Sequence: Synthetic oligonucleotide
  Target: COL7A1; (-) strand; PAM type: YTN; PAM sequence: CTG
gatatggtaagtggcctagg

SEQ ID NO: 28771 - DNA, 20 bp, Artificial Sequence
  Description of Artificial Sequence: Synthetic oligonucleotide
  Target: COL7A1; (-) strand; PAM type: YTN; PAM sequence: CTA
tgaccagtgcccagcagtgg

SEQ ID NO: 28772 - DNA, 20 bp, Artificial Sequence
  Description of Artificial Sequence: Synthetic oligonucleotide
  Target: COL7A1; (-) strand; PAM type: YTN; PAM sequence: CTC
caagtacatctatgaccagt

SEQ ID NO: 28773 - DNA, 20 bp, Artificial Sequence
  Description of Artificial Sequence: Synthetic oligonucleotide
  Target: COL7A1; (-) strand; PAM type: YTN; PAM sequence: CTG
ctccaagtacatctatgacc

SEQ ID NO: 28774 - DNA, 20 bp, Artificial Sequence
  Description of Artificial Sequence: Synthetic oligonucleotide
  Target: COL7A1; (-) strand; PAM type: YTN; PAM sequence: CTG
caggaggtggatgccagtgt

SEQ ID NO: 28775 - DNA, 20 bp, Artificial Sequence
  Description of Artificial Sequence: Synthetic oligonucleotide
  Target: COL7A1; (-) strand; PAM type: YTN; PAM sequence: CTC
accctgcaggaggtggatgc

SEQ ID NO: 28776 - DNA, 20 bp, Artificial Sequence
  Description of Artificial Sequence: Synthetic oligonucleotide
  Target: COL7A1; (-) strand; PAM type: YTN; PAM sequence: CTG
cctcaccctgcaggaggtgg

SEQ ID NO: 28777 - DNA, 20 bp, Artificial Sequence
  Description of Artificial Sequence: Synthetic oligonucleotide
  Target: COL7A1; (-) strand; PAM type: YTN; PAM sequence: CTC
tgcctcaccctgcaggaggt

SEQ ID NO: 28778 - DNA, 20 bp, Artificial Sequence
  Description of Artificial Sequence: Synthetic oligonucleotide
  Target: COL7A1; (-) strand; PAM type: YTN; PAM sequence: TTA
gccagtatgccctctgcctc

SEQ ID NO: 28779 - DNA, 20 bp, Artificial Sequence
  Description of Artificial Sequence: Synthetic oligonucleotide
  Target: COL7A1; (-) strand; PAM type: YTN; PAM sequence: CTG
aggtggtggccaggtgcccg

SEQ ID NO: 28780 - DNA, 20 bp, Artificial Sequence
  Description of Artificial Sequence: Synthetic oligonucleotide
  Target: COL7A1; (-) strand; PAM type: YTN; PAM sequence: CTG
gctgaggtggtggccaggtg

SEQ ID NO: 28781 - DNA, 20 bp, Artificial Sequence
  Description of Artificial Sequence: Synthetic oligonucleotide
  Target: COL7A1; (-) strand; PAM type: YTN; PAM sequence: CTG
actggctgaggtggtggcca

SEQ ID NO: 28782 - DNA, 20 bp, Artificial Sequence
  Description of Artificial Sequence: Synthetic oligonucleotide
  Target: COL7A1; (-) strand; PAM type: YTN; PAM sequence: TTG
gatgatgctgactggctgag

SEQ ID NO: 28783 - DNA, 20 bp, Artificial Sequence
  Description of Artificial Sequence: Synthetic oligonucleotide
  Target: COL7A1; (-) strand; PAM type: YTN; PAM sequence: CTA
gttggatgatgctgactggc

SEQ ID NO: 28784 - DNA, 20 bp, Artificial Sequence
  Description of Artificial Sequence: Synthetic oligonucleotide
  Target: COL7A1; (-) strand; PAM type: YTN; PAM sequence: CTG
ctagttggatgatgctgact

SEQ ID NO: 28785 - DNA, 20 bp, Artificial Sequence
  Description of Artificial Sequence: Synthetic oligonucleotide
  Target: COL7A1; (-) strand; PAM type: YTN; PAM sequence: CTC
tgctagttggatgatgctga

SEQ ID NO: 28786 - DNA, 20 bp, Artificial Sequence
  Description of Artificial Sequence: Synthetic oligonucleotide
  Target: COL7A1; (-) strand; PAM type: YTN; PAM sequence: CTG
tgggagatctctgctagttg

SEQ ID NO: 28787 - DNA, 20 bp, Artificial Sequence
  Description of Artificial Sequence: Synthetic oligonucleotide
  Target: COL7A1; (-) strand; PAM type: YTN; PAM sequence: CTG
cctgtgggagatctctgcta

SEQ ID NO: 28788 - DNA, 20 bp, Artificial Sequence
  Description of Artificial Sequence: Synthetic oligonucleotide
  Target: COL7A1; (-) strand; PAM type: YTN; PAM sequence: CTG
catgctgcctgtgggagatc

SEQ ID NO: 28789 - DNA, 20 bp, Artificial Sequence
  Description of Artificial Sequence: Synthetic oligonucleotide
  Target: COL7A1; (-) strand; PAM type: YTN; PAM sequence: CTG
gggacagctgcatgctgcct

SEQ ID NO: 28790 - DNA, 20 bp, Artificial Sequence
  Description of Artificial Sequence: Synthetic oligonucleotide
  Target: COL7A1; (-) strand; PAM type: YTN; PAM sequence: TTG
ggctggggacagctgcatgc

SEQ ID NO: 28791 - DNA, 20 bp, Artificial Sequence
  Description of Artificial Sequence: Synthetic oligonucleotide
  Target: COL7A1; (-) strand; PAM type: YTN; PAM sequence: TTT
gggctggggacagctgcatg

SEQ ID NO: 28792 - DNA, 20 bp, Artificial Sequence
  Description of Artificial Sequence: Synthetic oligonucleotide
  Target: COL7A1; (-) strand; PAM type: YTN; PAM sequence: TTT
tgggctggggacagctgcat

SEQ ID NO: 28793 - DNA, 20 bp, Artificial Sequence
  Description of Artificial Sequence: Synthetic oligonucleotide
  Target: COL7A1; (-) strand; PAM type: YTN; PAM sequence: CTT
ttgggctggggacagctgca

SEQ ID NO: 28794 - DNA, 20 bp, Artificial Sequence
  Description of Artificial Sequence: Synthetic oligonucleotide
  Target: COL7A1; (-) strand; PAM type: YTN; PAM sequence: CTC
ttttgggctggggacagctg

SEQ ID NO: 28795 - DNA, 20 bp, Artificial Sequence
  Description of Artificial Sequence: Synthetic oligonucleotide
  Target: COL7A1; (-) strand; PAM type: YTN; PAM sequence: TTC
ctcttttgggctggggacag

SEQ ID NO: 28796 - DNA, 20 bp, Artificial Sequence
  Description of Artificial Sequence: Synthetic oligonucleotide
  Target: COL7A1; (-) strand; PAM type: YTN; PAM sequence: TTT
cctcttttgggctggggaca

SEQ ID NO: 28797 - DNA, 20 bp, Artificial Sequence
  Description of Artificial Sequence: Synthetic oligonucleotide
  Target: COL7A1; (-) strand; PAM type: YTN; PAM sequence: CTT
tcctcttttgggctggggac

SEQ ID NO: 28798 - DNA, 20 bp, Artificial Sequence
  Description of Artificial Sequence: Synthetic oligonucleotide
  Target: COL7A1; (-) strand; PAM type: YTN; PAM sequence: CTG
cctttcctcttttgggctgg

SEQ ID NO: 28799 - DNA, 20 bp, Artificial Sequence
  Description of Artificial Sequence: Synthetic oligonucleotide
  Target: COL7A1; (-) strand; PAM type: YTN; PAM sequence: TTC
tgcctttcctcttttgggct

SEQ ID NO: 28800 - DNA, 20 bp, Artificial Sequence
  Description of Artificial Sequence: Synthetic oligonucleotide
  Target: COL7A1; (-) strand; PAM type: YTN; PAM sequence: CTT
ctgcctttcctcttttgggc

SEQ ID NO: 28801 - DNA, 20 bp, Artificial Sequence
  Description of Artificial Sequence: Synthetic oligonucleotide
  Target: COL7A1; (-) strand; PAM type: YTN; PAM sequence: CTA
tagcagggatcccttctgcc

SEQ ID NO: 28802 - DNA, 20 bp, Artificial Sequence
  Description of Artificial Sequence: Synthetic oligonucleotide
  Target: COL7A1; (-) strand; PAM type: YTN; PAM sequence: CTG
tggagatgggcggggcccat

SEQ ID NO: 28803 - DNA, 20 bp, Artificial Sequence
  Description of Artificial Sequence: Synthetic oligonucleotide
  Target: COL7A1; (-) strand; PAM type: YTN; PAM sequence: CTG
atggctgtggagatgggcgg

SEQ ID NO: 28804 - DNA, 20 bp, Artificial Sequence
  Description of Artificial Sequence: Synthetic oligonucleotide
  Target: COL7A1; (-) strand; PAM type: YTN; PAM sequence: CTG
caggggtagcatagtgggag

SEQ ID NO: 28805 - DNA, 20 bp, Artificial Sequence
  Description of Artificial Sequence: Synthetic oligonucleotide
  Target: COL7A1; (-) strand; PAM type: YTN; PAM sequence: CTG
tcacctgcaggggtagcata

SEQ ID NO: 28806 - DNA, 20 bp, Artificial Sequence
  Description of Artificial Sequence: Synthetic oligonucleotide
  Target: COL7A1; (-) strand; PAM type: YTN; PAM sequence: CTA
ggcagctgtcacctgcaggg

SEQ ID NO: 28807 - DNA, 20 bp, Artificial Sequence
  Description of Artificial Sequence: Synthetic oligonucleotide
  Target: COL7A1; (-) strand; PAM type: YTN; PAM sequence: CTG
gtgtcctaggcagctgtcac

SEQ ID NO: 28808 - DNA, 20 bp, Artificial Sequence
  Description of Artificial Sequence: Synthetic oligonucleotide
  Target: COL7A1; (-) strand; PAM type: YTN; PAM sequence: CTA
taggcatccctggtgtccta

SEQ ID NO: 28809 - DNA, 20 bp, Artificial Sequence
  Description of Artificial Sequence: Synthetic oligonucleotide
  Target: COL7A1; (-) strand; PAM type: YTN; PAM sequence: CTC
ctataggcatccctggtgtc

SEQ ID NO: 28810 - DNA, 20 bp, Artificial Sequence
  Description of Artificial Sequence: Synthetic oligonucleotide
  Target: COL7A1; (-) strand; PAM type: YTN; PAM sequence: CTG
ctcctataggcatccctggt

SEQ ID NO: 28811 - DNA, 20 bp, Artificial Sequence
  Description of Artificial Sequence: Synthetic oligonucleotide
  Target: COL7A1; (-) strand; PAM type: YTN; PAM sequence: CTG
gcatagcgcagcctgctcct

SEQ ID NO: 28812 - DNA, 20 bp, Artificial Sequence
  Description of Artificial Sequence: Synthetic oligonucleotide
  Target: COL7A1; (-) strand; PAM type: YTN; PAM sequence: TTG
gggcctggcatagcgcagcc

SEQ ID NO: 28813 - DNA, 20 bp, Artificial Sequence
  Description of Artificial Sequence: Synthetic oligonucleotide
  Target: COL7A1; (-) strand; PAM type: YTN; PAM sequence: CTG
ggaggtgtagggttggggcc

SEQ ID NO: 28814 - DNA, 20 bp, Artificial Sequence
  Description of Artificial Sequence: Synthetic oligonucleotide
  Target: COL7A1; (-) strand; PAM type: YTN; PAM sequence: CTG
gcagacacctgggaggtgta

SEQ ID NO: 28815 - DNA, 20 bp, Artificial Sequence
  Description of Artificial Sequence: Synthetic oligonucleotide
  Target: COL7A1; (-) strand; PAM type: YTN; PAM sequence: TTG
gcctggcagacacctgggag

SEQ ID NO: 28816 - DNA, 20 bp, Artificial Sequence
  Description of Artificial Sequence: Synthetic oligonucleotide
  Target: COL7A1; (-) strand; PAM type: YTN; PAM sequence: CTT
ggcctggcagacacctggga

SEQ ID NO: 28817 - DNA, 20 bp, Artificial Sequence
  Description of Artificial Sequence: Synthetic oligonucleotide
  Target: COL7A1; (-) strand; PAM type: YTN; PAM sequence: CTG
gagtcttggcctggcagaca

SEQ ID NO: 28818 - DNA, 20 bp, Artificial Sequence
  Description of Artificial Sequence: Synthetic oligonucleotide
  Target: COL7A1; (-) strand; PAM type: YTN; PAM sequence: TTC
tggagtcttggcctggcaga

SEQ ID NO: 28819 - DNA, 20 bp, Artificial Sequence
  Description of Artificial Sequence: Synthetic oligonucleotide
  Target: COL7A1; (-) strand; PAM type: YTN; PAM sequence: CTG
ggagaggttctggagtcttg

SEQ ID NO: 28820 - DNA, 20 bp, Artificial Sequence
  Description of Artificial Sequence: Synthetic oligonucleotide
  Target: COL7A1; (-) strand; PAM type: YTN; PAM sequence: TTG
cggtaacatggacccctggg

SEQ ID NO: 28821 - DNA, 20 bp, Artificial Sequence
  Description of Artificial Sequence: Synthetic oligonucleotide
  Target: COL7A1; (-) strand; PAM type: YTN; PAM sequence: CTG
aatgggaaagccggattgcg

SEQ ID NO: 28822 - DNA, 20 bp, Artificial Sequence
  Description of Artificial Sequence: Synthetic oligonucleotide
  Target: COL7A1; (-) strand; PAM type: YTN; PAM sequence: CTG
gctgaatgggaaagccggat

SEQ ID NO: 28823 - DNA, 20 bp, Artificial Sequence
  Description of Artificial Sequence: Synthetic oligonucleotide
  Target: COL7A1; (-) strand; PAM type: YTN; PAM sequence: CTA
tggccgccgcatccccctgg

SEQ ID NO: 28824 - DNA, 20 bp, Artificial Sequence
  Description of Artificial Sequence: Synthetic oligonucleotide
  Target: COL7A1; (-) strand; PAM type: YTN; PAM sequence: CTG
acctatggccgccgcatccc

SEQ ID NO: 28825 - DNA, 20 bp, Artificial Sequence
  Description of Artificial Sequence: Synthetic oligonucleotide
  Target: COL7A1; (-) strand; PAM type: YTN; PAM sequence: CTC
ctgacctatggccgccgcat

SEQ ID NO: 28826 - DNA, 20 bp, Artificial Sequence
  Description of Artificial Sequence: Synthetic oligonucleotide
  Target: COL7A1; (-) strand; PAM type: YTN; PAM sequence: CTG
tgtgtgaggacatcggacgc

SEQ ID NO: 28827 - DNA, 20 bp, Artificial Sequence
  Description of Artificial Sequence: Synthetic oligonucleotide
  Target: COL7A1; (-) strand; PAM type: YTN; PAM sequence: CTC
ctgtgtgtgaggacatcgga

SEQ ID NO: 28828 - DNA, 20 bp, Artificial Sequence
  Description of Artificial Sequence: Synthetic oligonucleotide
  Target: COL7A1; (-) strand; PAM type: YTN; PAM sequence: CTA
ctcctgtgtgtgaggacatc

SEQ ID NO: 28829 - DNA, 20 bp, Artificial Sequence
  Description of Artificial Sequence: Synthetic oligonucleotide
  Target: COL7A1; (-) strand; PAM type: YTN; PAM sequence: TTA
aaggcactactcctgtgtgt

SEQ ID NO: 28830 - DNA, 20 bp, Artificial Sequence
  Description of Artificial Sequence: Synthetic oligonucleotide
  Target: COL7A1; (-) strand; PAM type: YTN; PAM sequence: CTT
aaaggcactactcctgtgtg

SEQ ID NO: 28831 - DNA, 20 bp, Artificial Sequence
  Description of Artificial Sequence: Synthetic oligonucleotide
  Target: COL7A1; (-) strand; PAM type: YTN; PAM sequence: CTC
acccttaaaggcactactcc

SEQ ID NO: 28832 - DNA, 20 bp, Artificial Sequence
  Description of Artificial Sequence: Synthetic oligonucleotide
  Target: COL7A1; (-) strand; PAM type: YTN; PAM sequence: CTC
tcacccttaaaggcactact

SEQ ID NO: 28833 - DNA, 20 bp, Artificial Sequence
  Description of Artificial Sequence: Synthetic oligonucleotide
  Target: COL7A1; (-) strand; PAM type: YTN; PAM sequence: TTC
tctcacccttaaaggcacta

SEQ ID NO: 28834 - DNA, 20 bp, Artificial Sequence
  Description of Artificial Sequence: Synthetic oligonucleotide
  Target: COL7A1; (-) strand; PAM type: YTN; PAM sequence: CTT
ctctcacccttaaaggcact

SEQ ID NO: 28835 - DNA, 20 bp, Artificial Sequence
  Description of Artificial Sequence: Synthetic oligonucleotide
  Target: COL7A1; (-) strand; PAM type: YTN; PAM sequence: CTG
agccttctctcacccttaaa

SEQ ID NO: 28836 - DNA, 20 bp, Artificial Sequence
  Description of Artificial Sequence: Synthetic oligonucleotide
  Target: COL7A1; (-) strand; PAM type: YTN; PAM sequence: CTC
tgagccttctctcaccctta

SEQ ID NO: 28837 - DNA, 20 bp, Artificial Sequence
  Description of Artificial Sequence: Synthetic oligonucleotide
  Target: COL7A1; (-) strand; PAM type: YTN; PAM sequence: CTG
ggtggacctctgagccttct

SEQ ID NO: 28838 - DNA, 20 bp, Artificial Sequence
  Description of Artificial Sequence: Synthetic oligonucleotide
  Target: COL7A1; (-) strand; PAM type: YTN; PAM sequence: TTG
ggctgggtggacctctgagc

SEQ ID NO: 28839 - DNA, 20 bp, Artificial Sequence
  Description of Artificial Sequence: Synthetic oligonucleotide
  Target: COL7A1; (-) strand; PAM type: YTN; PAM sequence: CTG
tgggtccaggattgggctgg

SEQ ID NO: 28840 - DNA, 20 bp, Artificial Sequence
  Description of Artificial Sequence: Synthetic oligonucleotide
  Target: COL7A1; (-) strand; PAM type: YTN; PAM sequence: TTG
tgtacctgtgggtccaggat

SEQ ID NO: 28841 - DNA, 20 bp, Artificial Sequence
  Description of Artificial Sequence: Synthetic oligonucleotide
  Target: COL7A1; (-) strand; PAM type: YTN; PAM sequence: TTT
gtgtacctgtgggtccagga

SEQ ID NO: 28842 - DNA, 20 bp, Artificial Sequence
  Description of Artificial Sequence: Synthetic oligonucleotide
  Target: COL7A1; (-) strand; PAM type: YTN; PAM sequence: TTG
tttgtgtacctgtgggtcca

SEQ ID NO: 28843 - DNA, 20 bp, Artificial Sequence
  Description of Artificial Sequence: Synthetic oligonucleotide
  Target: COL7A1; (-) strand; PAM type: YTN; PAM sequence: CTG
gagattgtttgtgtacctgt

SEQ ID NO: 28844 - DNA, 20 bp, Artificial Sequence
  Description of Artificial Sequence: Synthetic oligonucleotide
  Target: COL7A1; (-) strand; PAM type: YTN; PAM sequence: CTG
aggctggagattgtttgtgt

SEQ ID NO: 28845 - DNA, 20 bp, Artificial Sequence
  Description of Artificial Sequence: Synthetic oligonucleotide
  Target: COL7A1; (-) strand; PAM type: YTN; PAM sequence: TTG
tcaacctgaggctggagatt

SEQ ID NO: 28846 - DNA, 20 bp, Artificial Sequence
  Description of Artificial Sequence: Synthetic oligonucleotide
  Target: COL7A1; (-) strand; PAM type: YTN; PAM sequence: CTT
gtcaacctgaggctggagat

SEQ ID NO: 28847 - DNA, 20 bp, Artificial Sequence
  Description of Artificial Sequence: Synthetic oligonucleotide
  Target: COL7A1; (-) strand; PAM type: YTN; PAM sequence: CTG
agtcagcatgaggtcaggga

SEQ ID NO: 28848 - DNA, 20 bp, Artificial Sequence
  Description of Artificial Sequence: Synthetic oligonucleotide
  Target: COL7A1; (+) strand; PAM type: YTN; PAM sequence: CTG
gcctgggcagggggccaggg

SEQ ID NO: 28849 - DNA, 20 bp, Artificial Sequence
  Description of Artificial Sequence: Synthetic oligonucleotide
  Target: COL7A1; (+) strand; PAM type: YTN; PAM sequence: CTG
ggcagggggccagggctatc

SEQ ID NO: 28850 - DNA, 20 bp, Artificial Sequence
  Description of Artificial Sequence: Synthetic oligonucleotide
  Target: COL7A1; (+) strand; PAM type: YTN; PAM sequence: CTA
tctctgggaaggcatcctca

SEQ ID NO: 28851 - DNA, 20 bp, Artificial Sequence
  Description of Artificial Sequence: Synthetic oligonucleotide
  Target: COL7A1; (+) strand; PAM type: YTN; PAM sequence: CTC
tgggaaggcatcctcacacc

SEQ ID NO: 28852 - DNA, 20 bp, Artificial Sequence
  Description of Artificial Sequence: Synthetic oligonucleotide
  Target: COL7A1; (+) strand; PAM type: YTN; PAM sequence: CTG
ggaaggcatcctcacaccca

SEQ ID NO: 28853 - DNA, 20 bp, Artificial Sequence
  Description of Artificial Sequence: Synthetic oligonucleotide
  Target: COL7A1; (+) strand; PAM type: YTN; PAM sequence: CTC
acacccagacaggatgagcc

SEQ ID NO: 28854 - DNA, 20 bp, Artificial Sequence
  Description of Artificial Sequence: Synthetic oligonucleotide
  Target: COL7A1; (+) strand; PAM type: YTN; PAM sequence: CTG
gttcccaggaaatgcaacag

SEQ ID NO: 28855 - DNA, 20 bp, Artificial Sequence
  Description of Artificial Sequence: Synthetic oligonucleotide
  Target: COL7A1; (+) strand; PAM type: YTN; PAM sequence: TTC
ccaggaaatgcaacagctct

SEQ ID NO: 28856 - DNA, 20 bp, Artificial Sequence
  Description of Artificial Sequence: Synthetic oligonucleotide
  Target: COL7A1; (+) strand; PAM type: YTN; PAM sequence: CTC
tgcaccttcctctcttcccc

SEQ ID NO: 28857 - DNA, 20 bp, Artificial Sequence
  Description of Artificial Sequence: Synthetic oligonucleotide
  Target: COL7A1; (+) strand; PAM type: YTN; PAM sequence: CTG
caccttcctctcttccccag

SEQ ID NO: 28858 - DNA, 20 bp, Artificial Sequence
  Description of Artificial Sequence: Synthetic oligonucleotide
  Target: COL7A1; (+) strand; PAM type: YTN; PAM sequence: CTT
cctctcttccccagaaagtc

SEQ ID NO: 28859 - DNA, 20 bp, Artificial Sequence
  Description of Artificial Sequence: Synthetic oligonucleotide
  Target: COL7A1; (+) strand; PAM type: YTN; PAM sequence: TTC
ctctcttccccagaaagtct

SEQ ID NO: 28860 - DNA, 20 bp, Artificial Sequence
  Description of Artificial Sequence: Synthetic oligonucleotide
  Target: COL7A1; (+) strand; PAM type: YTN; PAM sequence: CTC
tcttccccagaaagtctacc

SEQ ID NO: 28861 - DNA, 20 bp, Artificial Sequence
  Description of Artificial Sequence: Synthetic oligonucleotide
  Target: COL7A1; (+) strand; PAM type: YTN; PAM sequence: CTC
ttccccagaaagtctacccg

SEQ ID NO: 28862 - DNA, 20 bp, Artificial Sequence
  Description of Artificial Sequence: Synthetic oligonucleotide
  Target: COL7A1; (+) strand; PAM type: YTN; PAM sequence: CTT
ccccagaaagtctacccgtg

SEQ ID NO: 28863 - DNA, 20 bp, Artificial Sequence
  Description of Artificial Sequence: Synthetic oligonucleotide
  Target: COL7A1; (+) strand; PAM type: YTN; PAM sequence: TTC
cccagaaagtctacccgtgg

SEQ ID NO: 28864 - DNA, 20 bp, Artificial Sequence
  Description of Artificial Sequence: Synthetic oligonucleotide
  Target: COL7A1; (+) strand; PAM type: YTN; PAM sequence: CTA
cccgtggctgacccaggcac

SEQ ID NO: 28865 - DNA, 20 bp, Artificial Sequence
  Description of Artificial Sequence: Synthetic oligonucleotide
  Target: COL7A1; (+) strand; PAM type: YTN; PAM sequence: CTG
acccaggcaccctccttcaa

SEQ ID NO: 28866 - DNA, 20 bp, Artificial Sequence
  Description of Artificial Sequence: Synthetic oligonucleotide
  Target: COL7A1; (+) strand; PAM type: YTN; PAM sequence: CTC
cttcaaggccctatgtccag

SEQ ID NO: 28867 - DNA, 20 bp, Artificial Sequence
  Description of Artificial Sequence: Synthetic oligonucleotide
  Target: COL7A1; (+) strand; PAM type: YTN; PAM sequence: CTT
caaggccctatgtccagctg

SEQ ID NO: 28868 - DNA, 20 bp, Artificial Sequence
  Description of Artificial Sequence: Synthetic oligonucleotide
  Target: COL7A1; (+) strand; PAM type: YTN; PAM sequence: TTC
aaggccctatgtccagctgg

SEQ ID NO: 28869 - DNA, 20 bp, Artificial Sequence
  Description of Artificial Sequence: Synthetic oligonucleotide
  Target: COL7A1; (+) strand; PAM type: YTN; PAM sequence: CTA
tgtccagctggaaggccaca

SEQ ID NO: 28870 - DNA, 20 bp, Artificial Sequence
  Description of Artificial Sequence: Synthetic oligonucleotide
  Target: COL7A1; (+) strand; PAM type: YTN; PAM sequence: CTG
gaaggccacaggtcaacatc

SEQ ID NO: 28871 - DNA, 20 bp, Artificial Sequence
  Description of Artificial Sequence: Synthetic oligonucleotide
  Target: COL7A1; (+) strand; PAM type: YTN; PAM sequence: CTG
gggttcctccccaaggccac

SEQ ID NO: 28872 - DNA, 20 bp, Artificial Sequence
  Description of Artificial Sequence: Synthetic oligonucleotide
  Target: COL7A1; (+) strand; PAM type: YTN; PAM sequence: TTC
ctccccaaggccaccgtcca

SEQ ID NO: 28873 - DNA, 20 bp, Artificial Sequence
  Description of Artificial Sequence: Synthetic oligonucleotide
  Target: COL7A1; (+) strand; PAM type: YTN; PAM sequence: CTC
cccaaggccaccgtccacat

SEQ ID NO: 28874 - DNA, 20 bp, Artificial Sequence
  Description of Artificial Sequence: Synthetic oligonucleotide
  Target: COL7A1; (+) strand; PAM type: YTN; PAM sequence: CTG
ctctgaggatattctccatc

SEQ ID NO: 28875 - DNA, 20 bp, Artificial Sequence
  Description of Artificial Sequence: Synthetic oligonucleotide
  Target: COL7A1; (+) strand; PAM type: YTN; PAM sequence: CTC
tgaggatattctccatctcc

SEQ ID NO: 28876 - DNA, 20 bp, Artificial Sequence
  Description of Artificial Sequence: Synthetic oligonucleotide
  Target: COL7A1; (+) strand; PAM type: YTN; PAM sequence: CTG
aggatattctccatctcccc

SEQ ID NO: 28877 - DNA, 20 bp, Artificial Sequence
  Description of Artificial Sequence: Synthetic oligonucleotide
  Target: COL7A1; (+) strand; PAM type: YTN; PAM sequence: TTC
tccatctcccctcccatggc

SEQ ID NO: 28878 - DNA, 20 bp, Artificial Sequence
  Description of Artificial Sequence: Synthetic oligonucleotide
  Target: COL7A1; (+) strand; PAM type: YTN; PAM sequence: CTC
catctcccctcccatggccc

SEQ ID NO: 28879 - DNA, 20 bp, Artificial Sequence
  Description of Artificial Sequence: Synthetic oligonucleotide
  Target: COL7A1; (+) strand; PAM type: YTN; PAM sequence: CTC
ccctcccatggccctgtttg

SEQ ID NO: 28880 - DNA, 20 bp, Artificial Sequence
  Description of Artificial Sequence: Synthetic oligonucleotide
  Target: COL7A1; (+) strand; PAM type: YTN; PAM sequence: CTC
ccatggccctgtttgtcagg

SEQ ID NO: 28881 - DNA, 20 bp, Artificial Sequence
  Description of Artificial Sequence: Synthetic oligonucleotide
  Target: COL7A1; (+) strand; PAM type: YTN; PAM sequence: CTG
tttgtcaggtgggaaactga

SEQ ID NO: 28882 - DNA, 20 bp, Artificial Sequence
  Description of Artificial Sequence: Synthetic oligonucleotide
  Target: COL7A1; (+) strand; PAM type: YTN; PAM sequence: TTT
gtcaggtgggaaactgaggg

SEQ ID NO: 28883 - DNA, 20 bp, Artificial Sequence
  Description of Artificial Sequence: Synthetic oligonucleotide
  Target: COL7A1; (+) strand; PAM type: YTN; PAM sequence: TTG
tcaggtgggaaactgagggt

SEQ ID NO: 28884 - DNA, 20 bp, Artificial Sequence
  Description of Artificial Sequence: Synthetic oligonucleotide
  Target: COL7A1; (+) strand; PAM type: YTN; PAM sequence: CTG
agggtcaggaagagggagaa

SEQ ID NO: 28885 - DNA, 20 bp, Artificial Sequence
  Description of Artificial Sequence: Synthetic oligonucleotide
  Target: COL7A1; (+) strand; PAM type: YTN; PAM sequence: CTC
agctcaactcccagccttcc

SEQ ID NO: 28886 - DNA, 20 bp, Artificial Sequence
  Description of Artificial Sequence: Synthetic oligonucleotide
  Target: COL7A1; (+) strand; PAM type: YTN; PAM sequence: CTC
aactcccagccttccagacc

SEQ ID NO: 28887 - DNA, 20 bp, Artificial Sequence
  Description of Artificial Sequence: Synthetic oligonucleotide
  Target: COL7A1; (+) strand; PAM type: YTN; PAM sequence: CTC
ccagccttccagaccttgcc

SEQ ID NO: 28888 - DNA, 20 bp, Artificial Sequence
  Description of Artificial Sequence: Synthetic oligonucleotide
  Target: COL7A1; (+) strand; PAM type: YTN; PAM sequence: CTT
ccagaccttgcctgccacac

SEQ ID NO: 28889 - DNA, 20 bp, Artificial Sequence
  Description of Artificial Sequence: Synthetic oligonucleotide
  Target: COL7A1; (+) strand; PAM type: YTN; PAM sequence: TTC
cagaccttgcctgccacact

SEQ ID NO: 28890 - DNA, 20 bp, Artificial Sequence
  Description of Artificial Sequence: Synthetic oligonucleotide
  Target: COL7A1; (+) strand; PAM type: YTN; PAM sequence: CTT
gcctgccacactacagtgga

SEQ ID NO: 28891 - DNA, 20 bp, Artificial Sequence
  Description of Artificial Sequence: Synthetic oligonucleotide
  Target: COL7A1; (+) strand; PAM type: YTN; PAM sequence: TTG
cctgccacactacagtggaa

SEQ ID NO: 28892 - DNA, 20 bp, Artificial Sequence
  Description of Artificial Sequence: Synthetic oligonucleotide
  Target: COL7A1; (+) strand; PAM type: YTN; PAM sequence: CTG
ccacactacagtggaatcgc

SEQ ID NO: 28893 - DNA, 20 bp, Artificial Sequence
  Description of Artificial Sequence: Synthetic oligonucleotide
  Target: COL7A1; (+) strand; PAM type: YTN; PAM sequence: CTA
cagtggaatcgcacagtcca

SEQ ID NO: 28894 - DNA, 20 bp, Artificial Sequence
  Description of Artificial Sequence: Synthetic oligonucleotide
  Target: COL7A1; (+) strand; PAM type: YTN; PAM sequence: CTT
cacatgtgtgctcccactcc

SEQ ID NO: 28895 - DNA, 20 bp, Artificial Sequence
  Description of Artificial Sequence: Synthetic oligonucleotide
  Target: COL7A1; (+) strand; PAM type: YTN; PAM sequence: TTC
acatgtgtgctcccactccc

SEQ ID NO: 28896 - DNA, 20 bp, Artificial Sequence
  Description of Artificial Sequence: Synthetic oligonucleotide
  Target: COL7A1; (+) strand; PAM type: YTN; PAM sequence: CTC
ccactcccctgtgtcctctc

SEQ ID NO: 28897 - DNA, 20 bp, Artificial Sequence
  Description of Artificial Sequence: Synthetic oligonucleotide
  Target: COL7A1; (+) strand; PAM type: YTN; PAM sequence: CTC
ccctgtgtcctctccatgga

SEQ ID NO: 28898 - DNA, 20 bp, Artificial Sequence
  Description of Artificial Sequence: Synthetic oligonucleotide
  Target: COL7A1; (+) strand; PAM type: YTN; PAM sequence: CTG
tgtcctctccatggagatgc

SEQ ID NO: 28899 - DNA, 20 bp, Artificial Sequence
  Description of Artificial Sequence: Synthetic oligonucleotide
  Target: COL7A1; (+) strand; PAM type: YTN; PAM sequence: CTC
tccatggagatgctgtccca

SEQ ID NO: 28900 - DNA, 20 bp, Artificial Sequence
  Description of Artificial Sequence: Synthetic oligonucleotide
  Target: COL7A1; (+) strand; PAM type: YTN; PAM sequence: CTC
catggagatgctgtcccagc

SEQ ID NO: 28901 - DNA, 20 bp, Artificial Sequence
  Description of Artificial Sequence: Synthetic oligonucleotide
  Target: COL7A1; (+) strand; PAM type: YTN; PAM sequence: CTG
tcccagcgtctgctctctca

SEQ ID NO: 28902 - DNA, 20 bp, Artificial Sequence
  Description of Artificial Sequence: Synthetic oligonucleotide
  Target: COL7A1; (+) strand; PAM type: YTN; PAM sequence: CTG
ctctctcagcatcagcggat

SEQ ID NO: 28903 - DNA, 20 bp, Artificial Sequence
  Description of Artificial Sequence: Synthetic oligonucleotide
  Target: COL7A1; (+) strand; PAM type: YTN; PAM sequence: CTC
tctcagcatcagcggatgcc

SEQ ID NO: 28904 - DNA, 20 bp, Artificial Sequence
  Description of Artificial Sequence: Synthetic oligonucleotide
  Target: COL7A1; (+) strand; PAM type: YTN; PAM sequence: CTC
tcagcatcagcggatgcccg

SEQ ID NO: 28905 - DNA, 20 bp, Artificial Sequence
  Description of Artificial Sequence: Synthetic oligonucleotide
  Target: COL7A1; (+) strand; PAM type: YTN; PAM sequence: CTC
agcatcagcggatgcccggt

SEQ ID NO: 28906 - DNA, 20 bp, Artificial Sequence
  Description of Artificial Sequence: Synthetic oligonucleotide
  Target: COL7A1; (+) strand; PAM type: YTN; PAM sequence: CTC
tggccctcatggctttttcc

SEQ ID NO: 28907 - DNA, 20 bp, Artificial Sequence
  Description of Artificial Sequence: Synthetic oligonucleotide
  Target: COL7A1; (+) strand; PAM type: YTN; PAM sequence: CTG
gccctcatggctttttcctc

SEQ ID NO: 28908 - DNA, 20 bp, Artificial Sequence
  Description of Artificial Sequence: Synthetic oligonucleotide
  Target: COL7A1; (+) strand; PAM type: YTN; PAM sequence: CTC
atggctttttcctcctcagt

SEQ ID NO: 28909 - DNA, 20 bp, Artificial Sequence
  Description of Artificial Sequence: Synthetic oligonucleotide
  Target: COL7A1; (+) strand; PAM type: YTN; PAM sequence: CTT
tttcctcctcagtatatccg

SEQ ID NO: 28910 - DNA, 20 bp, Artificial Sequence
  Description of Artificial Sequence: Synthetic oligonucleotide
  Target: COL7A1; (+) strand; PAM type: YTN; PAM sequence: TTT
ttcctcctcagtatatccga

SEQ ID NO: 28911 - DNA, 20 bp, Artificial Sequence
  Description of Artificial Sequence: Synthetic oligonucleotide
  Target: COL7A1; (+) strand; PAM type: YTN; PAM sequence: TTT
tcctcctcagtatatccgaa

SEQ ID NO: 28912 - DNA, 20 bp, Artificial Sequence
  Description of Artificial Sequence: Synthetic oligonucleotide
  Target: COL7A1; (+) strand; PAM type: YTN; PAM sequence: TTT
cctcctcagtatatccgaaa

SEQ ID NO: 28913 - DNA, 20 bp, Artificial Sequence
  Description of Artificial Sequence: Synthetic oligonucleotide
  Target: COL7A1; (+) strand; PAM type: YTN; PAM sequence: TTC
ctcctcagtatatccgaaag

SEQ ID NO: 28914 - DNA, 20 bp, Artificial Sequence
  Description of Artificial Sequence: Synthetic oligonucleotide
  Target: COL7A1; (+) strand; PAM type: YTN; PAM sequence: CTC
ctcagtatatccgaaagtga

SEQ ID NO: 28915 - DNA, 20 bp, Artificial Sequence
  Description of Artificial Sequence: Synthetic oligonucleotide
  Target: COL7A1; (+) strand; PAM type: YTN; PAM sequence: CTC
agtatatccgaaagtgagcc

SEQ ID NO: 28916 - DNA, 20 bp, Artificial Sequence
  Description of Artificial Sequence: Synthetic oligonucleotide
  Target: COL7A1; (+) strand; PAM type: YTN; PAM sequence: CTG
ttctgtcccaggcgtgggaa

SEQ ID NO: 28917 - DNA, 20 bp, Artificial Sequence
  Description of Artificial Sequence: Synthetic oligonucleotide
  Target: COL7A1; (+) strand; PAM type: YTN; PAM sequence: TTC
tgtcccaggcgtgggaagta

SEQ ID NO: 28918 - DNA, 20 bp, Artificial Sequence
  Description of Artificial Sequence: Synthetic oligonucleotide
  Target: COL7A1; (+) strand; PAM type: YTN; PAM sequence: CTG
tcccaggcgtgggaagtatg

SEQ ID NO: 28919 - DNA, 20 bp, Artificial Sequence
  Description of Artificial Sequence: Synthetic oligonucleotide
  Target: COL7A1; (+) strand; PAM type: YTN; PAM sequence: CTG
ggatgtctgtacacacgtgt

SEQ ID NO: 28920 - DNA, 20 bp, Artificial Sequence
  Description of Artificial Sequence: Synthetic oligonucleotide
  Target: COL7A1; (+) strand; PAM type: YTN; PAM sequence: CTG
tacacacgtgtgaacatgtt

SEQ ID NO: 28921 - DNA, 20 bp, Artificial Sequence
  Description of Artificial Sequence: Synthetic oligonucleotide
  Target: COL7A1; (+) strand; PAM type: YTN; PAM sequence: TTC
tgctcagcctctgcccacca

SEQ ID NO: 28922 - DNA, 20 bp, Artificial Sequence
  Description of Artificial Sequence: Synthetic oligonucleotide
  Target: COL7A1; (+) strand; PAM type: YTN; PAM sequence: CTG
ctcagcctctgcccaccatg

SEQ ID NO: 28923 - DNA, 20 bp, Artificial Sequence
  Description of Artificial Sequence: Synthetic oligonucleotide
  Target: COL7A1; (+) strand; PAM type: YTN; PAM sequence: CTC
agcctctgcccaccatgaac

SEQ ID NO: 28924 - DNA, 20 bp, Artificial Sequence
  Description of Artificial Sequence: Synthetic oligonucleotide
  Target: COL7A1; (+) strand; PAM type: YTN; PAM sequence: CTC
tgcccaccatgaacctggct

SEQ ID NO: 28925 - DNA, 20 bp, Artificial Sequence
  Description of Artificial Sequence: Synthetic oligonucleotide
  Target: COL7A1; (+) strand; PAM type: YTN; PAM sequence: CTG
cccaccatgaacctggctgg

SEQ ID NO: 28926 - DNA, 20 bp, Artificial Sequence
  Description of Artificial Sequence: Synthetic oligonucleotide
  Target: COL7A1; (+) strand; PAM type: YTN; PAM sequence: CTG
gctggcctgaccctggttgg

SEQ ID NO: 28927 - DNA, 20 bp, Artificial Sequence
  Description of Artificial Sequence: Synthetic oligonucleotide
  Target: COL7A1; (+) strand; PAM type: YTN; PAM sequence: CTG
gcctgaccctggttggctcc

SEQ ID NO: 28928 - DNA, 20 bp, Artificial Sequence
  Description of Artificial Sequence: Synthetic oligonucleotide
  Target: COL7A1; (+) strand; PAM type: YTN; PAM sequence: CTG
accctggttggctcccaggg

SEQ ID NO: 28929 - DNA, 20 bp, Artificial Sequence
  Description of Artificial Sequence: Synthetic oligonucleotide
  Target: COL7A1; (+) strand; PAM type: YTN; PAM sequence: CTG
gttggctcccagggtgccct

SEQ ID NO: 28930 - DNA, 20 bp, Artificial Sequence
  Description of Artificial Sequence: Synthetic oligonucleotide
  Target: COL7A1; (+) strand; PAM type: YTN; PAM sequence: TTG
gctcccagggtgccctctgc

SEQ ID NO: 28931 - DNA, 20 bp, Artificial Sequence
  Description of Artificial Sequence: Synthetic oligonucleotide
  Target: COL7A1; (+) strand; PAM type: YTN; PAM sequence: CTC
ccagggtgccctctgcactg

SEQ ID NO: 28932 - DNA, 20 bp, Artificial Sequence
  Description of Artificial Sequence: Synthetic oligonucleotide
  Target: COL7A1; (+) strand; PAM type: YTN; PAM sequence: CTC
tgcactgaccactggacttc

SEQ ID NO: 28933 - DNA, 20 bp, Artificial Sequence
  Description of Artificial Sequence: Synthetic oligonucleotide
  Target: COL7A1; (+) strand; PAM type: YTN; PAM sequence: CTG
cactgaccactggacttcct

SEQ ID NO: 28934 - DNA, 20 bp, Artificial Sequence
  Description of Artificial Sequence: Synthetic oligonucleotide
  Target: COL7A1; (+) strand; PAM type: YTN; PAM sequence: CTG
accactggacttcctcccag

SEQ ID NO: 28935 - DNA, 20 bp, Artificial Sequence
  Description of Artificial Sequence: Synthetic oligonucleotide
  Target: COL7A1; (+) strand; PAM type: YTN; PAM sequence: CTG
gacttcctcccagtgtccca

SEQ ID NO: 28936 - DNA, 20 bp, Artificial Sequence
  Description of Artificial Sequence: Synthetic oligonucleotide
  Target: COL7A1; (+) strand; PAM type: YTN; PAM sequence: CTT
cctcccagtgtcccagccta

SEQ ID NO: 28937 - DNA, 20 bp, Artificial Sequence
  Description of Artificial Sequence: Synthetic oligonucleotide
  Target: COL7A1; (+) strand; PAM type: YTN; PAM sequence: TTC
ctcccagtgtcccagcctag

SEQ ID NO: 28938 - DNA, 20 bp, Artificial Sequence
  Description of Artificial Sequence: Synthetic oligonucleotide
  Target: COL7A1; (+) strand; PAM type: YTN; PAM sequence: CTC
ccagtgtcccagcctagaag

SEQ ID NO: 28939 - DNA, 20 bp, Artificial Sequence
  Description of Artificial Sequence: Synthetic oligonucleotide
  Target: COL7A1; (+) strand; PAM type: YTN; PAM sequence: CTA
gaagccatgtggtggccagt

SEQ ID NO: 28940 - DNA, 20 bp, Artificial Sequence
  Description of Artificial Sequence: Synthetic oligonucleotide
  Target: COL7A1; (+) strand; PAM type: YTN; PAM sequence: TTC
tcaaagctcaaactcttccc

SEQ ID NO: 28941 - DNA, 20 bp, Artificial Sequence
  Description of Artificial Sequence: Synthetic oligonucleotide
  Target: COL7A1; (+) strand; PAM type: YTN; PAM sequence: CTC
aaagctcaaactcttcccag

SEQ ID NO: 28942 - DNA, 20 bp, Artificial Sequence
  Description of Artificial Sequence: Synthetic oligonucleotide
  Target: COL7A1; (+) strand; PAM type: YTN; PAM sequence: CTC
aaactcttcccagtccctgt

SEQ ID NO: 28943 - DNA, 20 bp, Artificial Sequence
  Description of Artificial Sequence: Synthetic oligonucleotide
  Target: COL7A1; (+) strand; PAM type: YTN; PAM sequence: CTC
ttcccagtccctgtatctac

SEQ ID NO: 28944 - DNA, 20 bp, Artificial Sequence
  Description of Artificial Sequence: Synthetic oligonucleotide
  Target: COL7A1; (+) strand; PAM type: YTN; PAM sequence: CTT
cccagtccctgtatctactg

SEQ ID NO: 28945 - DNA, 20 bp, Artificial Sequence
  Description of Artificial Sequence: Synthetic oligonucleotide
  Target: COL7A1; (+) strand; PAM type: YTN; PAM sequence: TTC
ccagtccctgtatctactgg

SEQ ID NO: 28946 - DNA, 20 bp, Artificial Sequence
  Description of Artificial Sequence: Synthetic oligonucleotide
  Target: COL7A1; (+) strand; PAM type: YTN; PAM sequence: CTG
tatctactggccagtcctga

SEQ ID NO: 28947 - DNA, 20 bp, Artificial Sequence
  Description of Artificial Sequence: Synthetic oligonucleotide
  Target: COL7A1; (+) strand; PAM type: YTN; PAM sequence: CTA
ctggccagtcctgacagaac

SEQ ID NO: 28948 - DNA, 20 bp, Artificial Sequence
  Description of Artificial Sequence: Synthetic oligonucleotide
  Target: COL7A1; (+) strand; PAM type: YTN; PAM sequence: CTG
gccagtcctgacagaactgc

SEQ ID NO: 28949 - DNA, 20 bp, Artificial Sequence
  Description of Artificial Sequence: Synthetic oligonucleotide
  Target: COL7A1; (+) strand; PAM type: YTN; PAM sequence: CTG
acagaactgccaaaccatcc

SEQ ID NO: 28950 - DNA, 20 bp, Artificial Sequence
  Description of Artificial Sequence: Synthetic oligonucleotide
  Target: COL7A1; (+) strand; PAM type: YTN; PAM sequence: CTG
ccaaaccatcccaccacaca

SEQ ID NO: 28951 - DNA, 20 bp, Artificial Sequence
  Description of Artificial Sequence: Synthetic oligonucleotide
  Target: COL7A1; (+) strand; PAM type: YTN; PAM sequence: CTC
gctcctgttacccagcctgg

SEQ ID NO: 28952 - DNA, 20 bp, Artificial Sequence
  Description of Artificial Sequence: Synthetic oligonucleotide
  Target: COL7A1; (+) strand; PAM type: YTN; PAM sequence: CTC
ctgttacccagcctggagca

SEQ ID NO: 28953 - DNA, 20 bp, Artificial Sequence
  Description of Artificial Sequence: Synthetic oligonucleotide
  Target: COL7A1; (+) strand; PAM type: YTN; PAM sequence: CTG
ttacccagcctggagcacat

SEQ ID NO: 28954 - DNA, 20 bp, Artificial Sequence
  Description of Artificial Sequence: Synthetic oligonucleotide
  Target: COL7A1; (+) strand; PAM type: YTN; PAM sequence: TTA
cccagcctggagcacatagt

SEQ ID NO: 28955 - DNA, 20 bp, Artificial Sequence
  Description of Artificial Sequence: Synthetic oligonucleotide
  Target: COL7A1; (+) strand; PAM type: YTN; PAM sequence: CTG
gagcacatagtgcaatcatg

SEQ ID NO: 28956 - DNA, 20 bp, Artificial Sequence
  Description of Artificial Sequence: Synthetic oligonucleotide
  Target: COL7A1; (+) strand; PAM type: YTN; PAM sequence: CTC
actgcagccttgaactcctg

SEQ ID NO: 28957 - DNA, 20 bp, Artificial Sequence
  Description of Artificial Sequence: Synthetic oligonucleotide
  Target: COL7A1; (+) strand; PAM type: YTN; PAM sequence: CTG
cagccttgaactcctggcct

SEQ ID NO: 28958 - DNA, 20 bp, Artificial Sequence
  Description of Artificial Sequence: Synthetic oligonucleotide
  Target: COL7A1; (+) strand; PAM type: YTN; PAM sequence: CTT
gaactcctggcctcaagcga

SEQ ID NO: 28959 - DNA, 20 bp, Artificial Sequence
  Description of Artificial Sequence: Synthetic oligonucleotide
  Target: COL7A1; (+) strand; PAM type: YTN; PAM sequence: TTG
aactcctggcctcaagcgat

SEQ ID NO: 28960 - DNA, 20 bp, Artificial Sequence
  Description of Artificial Sequence: Synthetic oligonucleotide
  Target: COL7A1; (+) strand; PAM type: YTN; PAM sequence: CTC
ctggcctcaagcgatcctcc

SEQ ID NO: 28961 - DNA, 20 bp, Artificial Sequence
  Description of Artificial Sequence: Synthetic oligonucleotide
  Target: COL7A1; (+) strand; PAM type: YTN; PAM sequence: CTG
gcctcaagcgatcctcccgc

SEQ ID NO: 28962 - DNA, 20 bp, Artificial Sequence
  Description of Artificial Sequence: Synthetic oligonucleotide
  Target: COL7A1; (+) strand; PAM type: YTN; PAM sequence: CTC
aagcgatcctcccgcctcaa

SEQ ID NO: 28963 - DNA, 20 bp, Artificial Sequence
  Description of Artificial Sequence: Synthetic oligonucleotide
  Target: COL7A1; (+) strand; PAM type: YTN; PAM sequence: CTC
ccgcctcaacctcccaaagc

SEQ ID NO: 28964 - DNA, 20 bp, Artificial Sequence
  Description of Artificial Sequence: Synthetic oligonucleotide
  Target: COL7A1; (+) strand; PAM type: YTN; PAM sequence: CTC
aacctcccaaagccctgggt

SEQ ID NO: 28965 - DNA, 20 bp, Artificial Sequence
  Description of Artificial Sequence: Synthetic oligonucleotide
  Target: COL7A1; (+) strand; PAM type: YTN; PAM sequence: CTC
ccaaagccctgggtttatag

SEQ ID NO: 28966 - DNA, 20 bp, Artificial Sequence
  Description of Artificial Sequence: Synthetic oligonucleotide
  Target: COL7A1; (+) strand; PAM type: YTN; PAM sequence: CTG
ggtttatagccattagccac

SEQ ID NO: 28967 - DNA, 20 bp, Artificial Sequence
  Description of Artificial Sequence: Synthetic oligonucleotide
  Target: COL7A1; (+) strand; PAM type: YTN; PAM sequence: TTT
atagccattagccaccacat

SEQ ID NO: 28968 - DNA, 20 bp, Artificial Sequence
  Description of Artificial Sequence: Synthetic oligonucleotide
  Target: COL7A1; (+) strand; PAM type: YTN; PAM sequence: TTA
tagccattagccaccacatc

SEQ ID NO: 28969 - DNA, 20 bp, Artificial Sequence
  Description of Artificial Sequence: Synthetic oligonucleotide
  Target: COL7A1; (+) strand; PAM type: YTN; PAM sequence: TTA
gccaccacatctggcccaca

SEQ ID NO: 28970 - DNA, 20 bp, Artificial Sequence
  Description of Artificial Sequence: Synthetic oligonucleotide
  Target: COL7A1; (+) strand; PAM type: YTN; PAM sequence: CTG
gcccacaaaccaccctttgc

SEQ ID NO: 28971 - DNA, 20 bp, Artificial Sequence
  Description of Artificial Sequence: Synthetic oligonucleotide
  Target: COL7A1; (+) strand; PAM type: YTN; PAM sequence: CTT
tgcagcataaagacccaggg

SEQ ID NO: 28972 - DNA, 20 bp, Artificial Sequence
  Description of Artificial Sequence: Synthetic oligonucleotide
  Target: COL7A1; (+) strand; PAM type: YTN; PAM sequence: TTT
gcagcataaagacccagggg

SEQ ID NO: 28973 - DNA, 20 bp, Artificial Sequence
  Description of Artificial Sequence: Synthetic oligonucleotide
  Target: COL7A1; (+) strand; PAM type: YTN; PAM sequence: TTG
cagcataaagacccaggggt

SEQ ID NO: 28974 - DNA, 20 bp, Artificial Sequence
  Description of Artificial Sequence: Synthetic oligonucleotide
  Target: COL7A1; (+) strand; PAM type: YTN; PAM sequence: TTT
cagtgcatgccacacaggcc

SEQ ID NO: 28975 - DNA, 20 bp, Artificial Sequence
  Description of Artificial Sequence: Synthetic oligonucleotide
  Target: COL7A1; (+) strand; PAM type: YTN; PAM sequence: TTC
agtgcatgccacacaggccc

SEQ ID NO: 28976 - DNA, 20 bp, Artificial Sequence
  Description of Artificial Sequence: Synthetic oligonucleotide
  Target: COL7A1; (+) strand; PAM type: YTN; PAM sequence: CTG
atgcacacagagacactggc

SEQ ID NO: 28977 - DNA, 20 bp, Artificial Sequence
  Description of Artificial Sequence: Synthetic oligonucleotide
  Target: COL7A1; (+) strand; PAM type: YTN; PAM sequence: CTG
gcacagctgcacatgcacac

SEQ ID NO: 28978 - DNA, 20 bp, Artificial Sequence
  Description of Artificial Sequence: Synthetic oligonucleotide
  Target: COL7A1; (+) strand; PAM type: YTN; PAM sequence: CTG
cacatgcacacacagacgca

SEQ ID NO: 28979 - DNA, 20 bp, Artificial Sequence
  Description of Artificial Sequence: Synthetic oligonucleotide
  Target: COL7A1; (+) strand; PAM type: YTN; PAM sequence: CTC
acaagtcctgcaccccagca

SEQ ID NO: 28980 - DNA, 20 bp, Artificial Sequence
  Description of Artificial Sequence: Synthetic oligonucleotide
  Target: COL7A1; (+) strand; PAM type: YTN; PAM sequence: CTG
caccccagcatgtgcagaga

SEQ ID NO: 28981 - DNA, 20 bp, Artificial Sequence
  Description of Artificial Sequence: Synthetic oligonucleotide
  Target: COL7A1; (+) strand; PAM type: YTN; PAM sequence: CTG
cagtggggcctgctgctctc

SEQ ID NO: 28982 - DNA, 20 bp, Artificial Sequence
  Description of Artificial Sequence: Synthetic oligonucleotide
  Target: COL7A1; (+) strand; PAM type: YTN; PAM sequence: CTG
ctgctctctgctgcctccct

SEQ ID NO: 28983 - DNA, 20 bp, Artificial Sequence
  Description of Artificial Sequence: Synthetic oligonucleotide
  Target: COL7A1; (+) strand; PAM type: YTN; PAM sequence: CTG
ctctctgctgcctcccttcc

SEQ ID NO: 28984 - DNA, 20 bp, Artificial Sequence
  Description of Artificial Sequence: Synthetic oligonucleotide
  Target: COL7A1; (+) strand; PAM type: YTN; PAM sequence: CTC
tctgctgcctcccttcccac

SEQ ID NO: 28985 - DNA, 20 bp, Artificial Sequence
  Description of Artificial Sequence: Synthetic oligonucleotide
  Target: COL7A1; (+) strand; PAM type: YTN; PAM sequence: CTC
tgctgcctcccttcccacat

SEQ ID NO: 28986 - DNA, 20 bp, Artificial Sequence
  Description of Artificial Sequence: Synthetic oligonucleotide
  Target: COL7A1; (+) strand; PAM type: YTN; PAM sequence: CTG
ctgcctcccttcccacatat

SEQ ID NO: 28987 - DNA, 20 bp, Artificial Sequence
  Description of Artificial Sequence: Synthetic oligonucleotide
  Target: COL7A1; (+) strand; PAM type: YTN; PAM sequence: CTG
cctcccttcccacatatatc

SEQ ID NO: 28988 - DNA, 20 bp, Artificial Sequence
  Description of Artificial Sequence: Synthetic oligonucleotide
  Target: COL7A1; (+) strand; PAM type: YTN; PAM sequence: CTC
ccttcccacatatatctctc

SEQ ID NO: 28989 - DNA, 20 bp, Artificial Sequence
  Description of Artificial Sequence: Synthetic oligonucleotide
  Target: COL7A1; (+) strand; PAM type: YTN; PAM sequence: CTT
cccacatatatctctccacc

SEQ ID NO: 28990 - DNA, 20 bp, Artificial Sequence
  Description of Artificial Sequence: Synthetic oligonucleotide
  Target: COL7A1; (+) strand; PAM type: YTN; PAM sequence: TTC
ccacatatatctctccaccc

SEQ ID NO: 28991 - DNA, 20 bp, Artificial Sequence
  Description of Artificial Sequence: Synthetic oligonucleotide
  Target: COL7A1; (+) strand; PAM type: YTN; PAM sequence: CTC
tccacccccagccctgctgt

SEQ ID NO: 28992 - DNA, 20 bp, Artificial Sequence
  Description of Artificial Sequence: Synthetic oligonucleotide
  Target: COL7A1; (+) strand; PAM type: YTN; PAM sequence: CTC
cacccccagccctgctgtcc

SEQ ID NO: 28993 - DNA, 20 bp, Artificial Sequence
  Description of Artificial Sequence: Synthetic oligonucleotide
  Target: COL7A1; (+) strand; PAM type: YTN; PAM sequence: CTG
ctgtccactgggaggttcag

SEQ ID NO: 28994 - DNA, 20 bp, Artificial Sequence
  Description of Artificial Sequence: Synthetic oligonucleotide
  Target: COL7A1; (+) strand; PAM type: YTN; PAM sequence: CTG
tccactgggaggttcaggag

SEQ ID NO: 28995 - DNA, 20 bp, Artificial Sequence
  Description of Artificial Sequence: Synthetic oligonucleotide
  Target: COL7A1; (+) strand; PAM type: YTN; PAM sequence: CTG
ggaggttcaggagtttccag

SEQ ID NO: 28996 - DNA, 20 bp, Artificial Sequence
  Description of Artificial Sequence: Synthetic oligonucleotide
  Target: COL7A1; (+) strand; PAM type: YTN; PAM sequence: TTC
aggagtttccaggaattcca

SEQ ID NO: 28997 - DNA, 20 bp, Artificial Sequence
  Description of Artificial Sequence: Synthetic oligonucleotide
  Target: COL7A1; (+) strand; PAM type: YTN; PAM sequence: TTT
ccaggaattccagcttcctc

SEQ ID NO: 28998 - DNA, 20 bp, Artificial Sequence
  Description of Artificial Sequence: Synthetic oligonucleotide
  Target: COL7A1; (+) strand; PAM type: YTN; PAM sequence: TTC
caggaattccagcttcctct

SEQ ID NO: 28999 - DNA, 20 bp, Artificial Sequence
  Description of Artificial Sequence: Synthetic oligonucleotide
  Target: COL7A1; (+) strand; PAM type: YTN; PAM sequence: TTC
cagcttcctctggccatttc

SEQ ID NO: 29000 - DNA, 20 bp, Artificial Sequence
  Description of Artificial Sequence: Synthetic oligonucleotide
  Target: COL7A1; (+) strand; PAM type: YTN; PAM sequence: CTT
cctctggccatttccagcaa

SEQ ID NO: 29001 - DNA, 20 bp, Artificial Sequence
  Description of Artificial Sequence: Synthetic oligonucleotide
  Target: COL7A1; (+) strand; PAM type: YTN; PAM sequence: TTC
ctctggccatttccagcaaa

SEQ ID NO: 29002 - DNA, 20 bp, Artificial Sequence
  Description of Artificial Sequence: Synthetic oligonucleotide
  Target: COL7A1; (+) strand; PAM type: YTN; PAM sequence: CTC
tggccatttccagcaaagga

SEQ ID NO: 29003 - DNA, 20 bp, Artificial Sequence
  Description of Artificial Sequence: Synthetic oligonucleotide
  Target: COL7A1; (+) strand; PAM type: YTN; PAM sequence: CTG
gccatttccagcaaaggatt

SEQ ID NO: 29004 - DNA, 20 bp, Artificial Sequence
  Description of Artificial Sequence: Synthetic oligonucleotide
  Target: COL7A1; (+) strand; PAM type: YTN; PAM sequence: TTT
ccagcaaaggattgtcccct

SEQ ID NO: 29005 - DNA, 20 bp, Artificial Sequence
  Description of Artificial Sequence: Synthetic oligonucleotide
  Target: COL7A1; (+) strand; PAM type: YTN; PAM sequence: TTC
cagcaaaggattgtcccctg

SEQ ID NO: 29006 - DNA, 20 bp, Artificial Sequence
  Description of Artificial Sequence: Synthetic oligonucleotide
  Target: COL7A1; (+) strand; PAM type: YTN; PAM sequence: TTG
tcccctgtgtctccctgggc

SEQ ID NO: 29007 - DNA, 20 bp, Artificial Sequence
  Description of Artificial Sequence: Synthetic oligonucleotide
  Target: COL7A1; (+) strand; PAM type: YTN; PAM sequence: CTG
tgtctccctgggcccagggc

SEQ ID NO: 29008 - DNA, 20 bp, Artificial Sequence
  Description of Artificial Sequence: Synthetic oligonucleotide
  Target: COL7A1; (+) strand; PAM type: YTN; PAM sequence: CTC
cctgggcccagggctcacaa

SEQ ID NO: 29009 - DNA, 20 bp, Artificial Sequence
  Description of Artificial Sequence: Synthetic oligonucleotide
  Target: COL7A1; (+) strand; PAM type: YTN; PAM sequence: CTG
ggcccagggctcacaaggag

SEQ ID NO: 29010 - DNA, 20 bp, Artificial Sequence
  Description of Artificial Sequence: Synthetic oligonucleotide
  Target: COL7A1; (+) strand; PAM type: YTN; PAM sequence: CTC
acaaggagtgtgaagttctg

SEQ ID NO: 29011 - DNA, 20 bp, Artificial Sequence
  Description of Artificial Sequence: Synthetic oligonucleotide
  Target: COL7A1; (+) strand; PAM type: YTN; PAM sequence: TTC
tgacttcaggttatagaacc

SEQ ID NO: 29012 - DNA, 20 bp, Artificial Sequence
  Description of Artificial Sequence: Synthetic oligonucleotide
  Target: COL7A1; (+) strand; PAM type: YTN; PAM sequence: CTG
acttcaggttatagaaccat

SEQ ID NO: 29013 - DNA, 20 bp, Artificial Sequence
  Description of Artificial Sequence: Synthetic oligonucleotide
  Target: COL7A1; (+) strand; PAM type: YTN; PAM sequence: CTT
caggttatagaaccatgtca

SEQ ID NO: 29014 - DNA, 20 bp, Artificial Sequence
  Description of Artificial Sequence: Synthetic oligonucleotide
  Target: COL7A1; (+) strand; PAM type: YTN; PAM sequence: TTC
aggttatagaaccatgtcac

SEQ ID NO: 29015 - DNA, 20 bp, Artificial Sequence
  Description of Artificial Sequence: Synthetic oligonucleotide
  Target: COL7A1; (+) strand; PAM type: YTN; PAM sequence: TTA
tagaaccatgtcaccaagca

SEQ ID NO: 29016 - DNA, 20 bp, Artificial Sequence
  Description of Artificial Sequence: Synthetic oligonucleotide
  Target: COL7A1; (+) strand; PAM type: YTN; PAM sequence: CTG
ggaaccctgatctgcacttc

SEQ ID NO: 29017 - DNA, 20 bp, Artificial Sequence
  Description of Artificial Sequence: Synthetic oligonucleotide
  Target: COL7A1; (+) strand; PAM type: YTN; PAM sequence: CTG
atctgcacttcctccttcca

SEQ ID NO: 29018 - DNA, 20 bp, Artificial Sequence
  Description of Artificial Sequence: Synthetic oligonucleotide
  Target: COL7A1; (+) strand; PAM type: YTN; PAM sequence: CTG
cacttcctccttccagcctg

SEQ ID NO: 29019 - DNA, 20 bp, Artificial Sequence
  Description of Artificial Sequence: Synthetic oligonucleotide
  Target: COL7A1; (+) strand; PAM type: YTN; PAM sequence: CTT
cctccttccagcctgccaca

SEQ ID NO: 29020 - DNA, 20 bp, Artificial Sequence
  Description of Artificial Sequence: Synthetic oligonucleotide
  Target: COL7A1; (+) strand; PAM type: YTN; PAM sequence: TTC
ctccttccagcctgccacag

SEQ ID NO: 29021 - DNA, 20 bp, Artificial Sequence
  Description of Artificial Sequence: Synthetic oligonucleotide
  Target: COL7A1; (+) strand; PAM type: YTN; PAM sequence: CTC
cttccagcctgccacagggc

SEQ ID NO: 29022 - DNA, 20 bp, Artificial Sequence
  Description of Artificial Sequence: Synthetic oligonucleotide
  Target: COL7A1; (+) strand; PAM type: YTN; PAM sequence: CTT
ccagcctgccacagggcgta

SEQ ID NO: 29023 - DNA, 20 bp, Artificial Sequence
  Description of Artificial Sequence: Synthetic oligonucleotide
  Target: COL7A1; (+) strand; PAM type: YTN; PAM sequence: TTC
cagcctgccacagggcgtac

SEQ ID NO: 29024 - DNA, 20 bp, Artificial Sequence
  Description of Artificial Sequence: Synthetic oligonucleotide
  Target: COL7A1; (+) strand; PAM type: YTN; PAM sequence: CTG
ccacagggcgtacagtaggt

SEQ ID NO: 29025 - DNA, 20 bp, Artificial Sequence
  Description of Artificial Sequence: Synthetic oligonucleotide
  Target: COL7A1; (+) strand; PAM type: YTN; PAM sequence: CTT
agggattcaggaccagcaag

SEQ ID NO: 29026 - DNA, 20 bp, Artificial Sequence
  Description of Artificial Sequence: Synthetic oligonucleotide
  Target: COL7A1; (+) strand; PAM type: YTN; PAM sequence: TTA
gggattcaggaccagcaagg

SEQ ID NO: 29027 - DNA, 20 bp, Artificial Sequence
  Description of Artificial Sequence: Synthetic oligonucleotide
  Target: COL7A1; (+) strand; PAM type: YTN; PAM sequence: TTC
aggaccagcaagggcacaca

SEQ ID NO: 29028 - DNA, 20 bp, Artificial Sequence
  Description of Artificial Sequence: Synthetic oligonucleotide
  Target: COL7A1; (+) strand; PAM type: YTN; PAM sequence: TTC
agagaggttcatgaccaaac

SEQ ID NO: 29029 - DNA, 20 bp, Artificial Sequence
  Description of Artificial Sequence: Synthetic oligonucleotide
  Target: COL7A1; (+) strand; PAM type: YTN; PAM sequence: TTC
atgaccaaactgagtacaca

SEQ ID NO: 29030 - DNA, 20 bp, Artificial Sequence
  Description of Artificial Sequence: Synthetic oligonucleotide
  Target: COL7A1; (+) strand; PAM type: YTN; PAM sequence: CTG
agtacacagcaggtgttcag

SEQ ID NO: 29031 - DNA, 20 bp, Artificial Sequence
  Description of Artificial Sequence: Synthetic oligonucleotide
  Target: COL7A1; (+) strand; PAM type: YTN; PAM sequence: TTC
agagaagctcaggactggca

SEQ ID NO: 29032 - DNA, 20 bp, Artificial Sequence
  Description of Artificial Sequence: Synthetic oligonucleotide
  Target: COL7A1; (+) strand; PAM type: YTN; PAM sequence: CTC
aggactggcacagggcacac

SEQ ID NO: 29033 - DNA, 20 bp, Artificial Sequence
  Description of Artificial Sequence: Synthetic oligonucleotide
  Target: COL7A1; (+) strand; PAM type: YTN; PAM sequence: CTG
gcacagggcacacagcagac

SEQ ID NO: 29034 - DNA, 20 bp, Artificial Sequence
  Description of Artificial Sequence: Synthetic oligonucleotide
  Target: COL7A1; (+) strand; PAM type: YTN; PAM sequence: CTA
gaagtgctggtttaagggct

SEQ ID NO: 29035 - DNA, 20 bp, Artificial Sequence
  Description of Artificial Sequence: Synthetic oligonucleotide
  Target: COL7A1; (+) strand; PAM type: YTN; PAM sequence: CTG
gtttaagggctaaagccaca

SEQ ID NO: 29036 - DNA, 20 bp, Artificial Sequence
  Description of Artificial Sequence: Synthetic oligonucleotide
  Target: COL7A1; (+) strand; PAM type: YTN; PAM sequence: TTT
aagggctaaagccacatcat

SEQ ID NO: 29037 - DNA, 20 bp, Artificial Sequence
  Description of Artificial Sequence: Synthetic oligonucleotide
  Target: COL7A1; (+) strand; PAM type: YTN; PAM sequence: TTA
agggctaaagccacatcatg

SEQ ID NO: 29038 - DNA, 20 bp, Artificial Sequence
  Description of Artificial Sequence: Synthetic oligonucleotide
  Target: COL7A1; (+) strand; PAM type: YTN; PAM sequence: CTA
aagccacatcatgtgaaacc

SEQ ID NO: 29039 - DNA, 20 bp, Artificial Sequence
  Description of Artificial Sequence: Synthetic oligonucleotide
  Target: COL7A1; (+) strand; PAM type: YTN; PAM sequence: CTA
aatgagcctctagacttccc

SEQ ID NO: 29040 - DNA, 20 bp, Artificial Sequence
  Description of Artificial Sequence: Synthetic oligonucleotide
  Target: COL7A1; (+) strand; PAM type: YTN; PAM sequence: CTC
tagacttccccaaactggtg

SEQ ID NO: 29041 - DNA, 20 bp, Artificial Sequence
  Description of Artificial Sequence: Synthetic oligonucleotide
  Target: COL7A1; (+) strand; PAM type: YTN; PAM sequence: CTA
gacttccccaaactggtgtg

SEQ ID NO: 29042 - DNA, 20 bp, Artificial Sequence
  Description of Artificial Sequence: Synthetic oligonucleotide
  Target: COL7A1; (+) strand; PAM type: YTN; PAM sequence: CTT
ccccaaactggtgtgacccc

SEQ ID NO: 29043 - DNA, 20 bp, Artificial Sequence
  Description of Artificial Sequence: Synthetic oligonucleotide
  Target: COL7A1; (+) strand; PAM type: YTN; PAM sequence: TTC
cccaaactggtgtgacccca

SEQ ID NO: 29044 - DNA, 20 bp, Artificial Sequence
  Description of Artificial Sequence: Synthetic oligonucleotide
  Target: COL7A1; (+) strand; PAM type: YTN; PAM sequence: CTG
gtgtgaccccaagaggaaac

SEQ ID NO: 29045 - DNA, 20 bp, Artificial Sequence
  Description of Artificial Sequence: Synthetic oligonucleotide
  Target: COL7A1; (+) strand; PAM type: YTN; PAM sequence: CTG
gacaaacatgatcccttgga

SEQ ID NO: 29046 - DNA, 20 bp, Artificial Sequence
  Description of Artificial Sequence: Synthetic oligonucleotide
  Target: COL7A1; (+) strand; PAM type: YTN; PAM sequence: CTT
ggaggccagcaaagagcaga

SEQ ID NO: 29047 - DNA, 20 bp, Artificial Sequence
  Description of Artificial Sequence: Synthetic oligonucleotide
  Target: COL7A1; (+) strand; PAM type: YTN; PAM sequence: TTG
gaggccagcaaagagcagag

SEQ ID NO: 29048 - DNA, 20 bp, Artificial Sequence
  Description of Artificial Sequence: Synthetic oligonucleotide
  Target: COL7A1; (+) strand; PAM type: YTN; PAM sequence: CTG
ggcagcgccagctggcggtc

SEQ ID NO: 29049 - DNA, 20 bp, Artificial Sequence
  Description of Artificial Sequence: Synthetic oligonucleotide
  Target: COL7A1; (+) strand; PAM type: YTN; PAM sequence: CTG
gcggtccctccccctgggct

SEQ ID NO: 29050 - DNA, 20 bp, Artificial Sequence
  Description of Artificial Sequence: Synthetic oligonucleotide
  Target: COL7A1; (+) strand; PAM type: YTN; PAM sequence: CTC
cccctgggctggaggaagac

SEQ ID NO: 29051 - DNA, 20 bp, Artificial Sequence
  Description of Artificial Sequence: Synthetic oligonucleotide
  Target: COL7A1; (+) strand; PAM type: YTN; PAM sequence: CTG
ggctggaggaagacactatt

SEQ ID NO: 29052 - DNA, 20 bp, Artificial Sequence
  Description of Artificial Sequence: Synthetic oligonucleotide
  Target: COL7A1; (+) strand; PAM type: YTN; PAM sequence: CTG
gaggaagacactatttatag

SEQ ID NO: 29053 - DNA, 20 bp, Artificial Sequence
  Description of Artificial Sequence: Synthetic oligonucleotide
  Target: COL7A1; (+) strand; PAM type: YTN; PAM sequence: CTA
tttatagttcccccttggcc

SEQ ID NO: 29054 - DNA, 20 bp, Artificial Sequence
  Description of Artificial Sequence: Synthetic oligonucleotide
  Target: COL7A1; (+) strand; PAM type: YTN; PAM sequence: TTT
atagttcccccttggcccag

SEQ ID NO: 29055 - DNA, 20 bp, Artificial Sequence
  Description of Artificial Sequence: Synthetic oligonucleotide
  Target: COL7A1; (+) strand; PAM type: YTN; PAM sequence: TTA
tagttcccccttggcccagc

SEQ ID NO: 29056 - DNA, 20 bp, Artificial Sequence
  Description of Artificial Sequence: Synthetic oligonucleotide
  Target: COL7A1; (+) strand; PAM type: YTN; PAM sequence: TTC
ccccttggcccagccccctc

SEQ ID NO: 29057 - DNA, 20 bp, Artificial Sequence
  Description of Artificial Sequence: Synthetic oligonucleotide
  Target: COL7A1; (+) strand; PAM type: YTN; PAM sequence: CTT
ggcccagccccctctccctt

SEQ ID NO: 29058 - DNA, 20 bp, Artificial Sequence
  Description of Artificial Sequence: Synthetic oligonucleotide
  Target: COL7A1; (+) strand; PAM type: YTN; PAM sequence: TTG
gcccagccccctctcccttg

SEQ ID NO: 29059 - DNA, 20 bp, Artificial Sequence
  Description of Artificial Sequence: Synthetic oligonucleotide
  Target: COL7A1; (+) strand; PAM type: YTN; PAM sequence: CTC
tcccttgcagggcgacagtt

SEQ ID NO: 29060 - DNA, 20 bp, Artificial Sequence
  Description of Artificial Sequence: Synthetic oligonucleotide
  Target: COL7A1; (+) strand; PAM type: YTN; PAM sequence: CTC
ccttgcagggcgacagtttt

SEQ ID NO: 29061 - DNA, 20 bp, Artificial Sequence
  Description of Artificial Sequence: Synthetic oligonucleotide
  Target: COL7A1; (+) strand; PAM type: YTN; PAM sequence: CTT
gcagggcgacagttttcccc

SEQ ID NO: 29062 - DNA, 20 bp, Artificial Sequence
  Description of Artificial Sequence: Synthetic oligonucleotide
  Target: COL7A1; (+) strand; PAM type: YTN; PAM sequence: TTG
cagggcgacagttttccccc

SEQ ID NO: 29063 - DNA, 20 bp, Artificial Sequence
  Description of Artificial Sequence: Synthetic oligonucleotide
  Target: COL7A1; (+) strand; PAM type: YTN; PAM sequence: TTT
tccccctccttcgggccact

SEQ ID NO: 29064 - DNA, 20 bp, Artificial Sequence
  Description of Artificial Sequence: Synthetic oligonucleotide
  Target: COL7A1; (+) strand; PAM type: YTN; PAM sequence: TTT
ccccctccttcgggccactg

SEQ ID NO: 29065 - DNA, 20 bp, Artificial Sequence
  Description of Artificial Sequence: Synthetic oligonucleotide
  Target: COL7A1; (+) strand; PAM type: YTN; PAM sequence: TTC
cccctccttcgggccactga

SEQ ID NO: 29066 - DNA, 20 bp, Artificial Sequence
  Description of Artificial Sequence: Synthetic oligonucleotide
  Target: COL7A1; (+) strand; PAM type: YTN; PAM sequence: CTC
cttcgggccactgacagatg

SEQ ID NO: 29067 - DNA, 20 bp, Artificial Sequence
  Description of Artificial Sequence: Synthetic oligonucleotide
  Target: COL7A1; (+) strand; PAM type: YTN; PAM sequence: CTT
cgggccactgacagatgaat

SEQ ID NO: 29068 - DNA, 20 bp, Artificial Sequence
  Description of Artificial Sequence: Synthetic oligonucleotide
  Target: COL7A1; (+) strand; PAM type: YTN; PAM sequence: TTC
gggccactgacagatgaatg

SEQ ID NO: 29069 - DNA, 20 bp, Artificial Sequence
  Description of Artificial Sequence: Synthetic oligonucleotide
  Target: COL7A1; (+) strand; PAM type: YTN; PAM sequence: CTG
acagatgaatggccctcaga

SEQ ID NO: 29070 - DNA, 20 bp, Artificial Sequence
  Description of Artificial Sequence: Synthetic oligonucleotide
  Target: COL7A1; (+) strand; PAM type: YTN; PAM sequence: CTC
agagcacccctaaaccagga

SEQ ID NO: 29071 - DNA, 20 bp, Artificial Sequence
  Description of Artificial Sequence: Synthetic oligonucleotide
  Target: COL7A1; (+) strand; PAM type: YTN; PAM sequence: CTA
aaccaggagagaccccccaa

SEQ ID NO: 29072 - DNA, 20 bp, Artificial Sequence
  Description of Artificial Sequence: Synthetic oligonucleotide
  Target: COL7A1; (+) strand; PAM type: YTN; PAM sequence: CTC
tcgcacccctccagcaccac

SEQ ID NO: 29073 - DNA, 20 bp, Artificial Sequence
  Description of Artificial Sequence: Synthetic oligonucleotide
  Target: COL7A1; (+) strand; PAM type: YTN; PAM sequence: CTC
gcacccctccagcaccaccc

SEQ ID NO: 29074 - DNA, 20 bp, Artificial Sequence
  Description of Artificial Sequence: Synthetic oligonucleotide
  Target: COL7A1; (+) strand; PAM type: YTN; PAM sequence: CTC
cagcaccaccctgacttcat

SEQ ID NO: 29075 - DNA, 20 bp, Artificial Sequence
  Description of Artificial Sequence: Synthetic oligonucleotide
  Target: COL7A1; (+) strand; PAM type: YTN; PAM sequence: CTG
acttcatccaggtctttccc

SEQ ID NO: 29076 - DNA, 20 bp, Artificial Sequence
  Description of Artificial Sequence: Synthetic oligonucleotide
  Target: COL7A1; (+) strand; PAM type: YTN; PAM sequence: CTT
catccaggtctttccctaac

SEQ ID NO: 29077 - DNA, 20 bp, Artificial Sequence
  Description of Artificial Sequence: Synthetic oligonucleotide
  Target: COL7A1; (+) strand; PAM type: YTN; PAM sequence: TTC
atccaggtctttccctaacc

SEQ ID NO: 29078 - DNA, 20 bp, Artificial Sequence
  Description of Artificial Sequence: Synthetic oligonucleotide
  Target: COL7A1; (+) strand; PAM type: YTN; PAM sequence: CTT
tccctaaccctccaccctcc

SEQ ID NO: 29079 - DNA, 20 bp, Artificial Sequence
  Description of Artificial Sequence: Synthetic oligonucleotide
  Target: COL7A1; (+) strand; PAM type: YTN; PAM sequence: TTT
ccctaaccctccaccctccc

SEQ ID NO: 29080 - DNA, 20 bp, Artificial Sequence
  Description of Artificial Sequence: Synthetic oligonucleotide
  Target: COL7A1; (+) strand; PAM type: YTN; PAM sequence: TTC
cctaaccctccaccctcccc

SEQ ID NO: 29081 - DNA, 20 bp, Artificial Sequence
  Description of Artificial Sequence: Synthetic oligonucleotide
  Target: COL7A1; (+) strand; PAM type: YTN; PAM sequence: CTA
accctccaccctccccacgc

SEQ ID NO: 29082 - DNA, 20 bp, Artificial Sequence
  Description of Artificial Sequence: Synthetic oligonucleotide
  Target: COL7A1; (+) strand; PAM type: YTN; PAM sequence: CTC
caccctccccacgctgtccc

SEQ ID NO: 29083 - DNA, 20 bp, Artificial Sequence
  Description of Artificial Sequence: Synthetic oligonucleotide
  Target: COL7A1; (+) strand; PAM type: YTN; PAM sequence: CTC
cccacgctgtcccgtgccta

SEQ ID NO: 29084 - DNA, 20 bp, Artificial Sequence
  Description of Artificial Sequence: Synthetic oligonucleotide
  Target: COL7A1; (+) strand; PAM type: YTN; PAM sequence: CTG
tcccgtgcctaccccgcctg

SEQ ID NO: 29085 - DNA, 20 bp, Artificial Sequence
  Description of Artificial Sequence: Synthetic oligonucleotide
  Target: COL7A1; (+) strand; PAM type: YTN; PAM sequence: CTA
ccccgcctgctgctccccgg

SEQ ID NO: 29086 - DNA, 20 bp, Artificial Sequence
  Description of Artificial Sequence: Synthetic oligonucleotide
  Target: COL7A1; (+) strand; PAM type: YTN; PAM sequence: CTG
ctgctccccggccccaggtc

SEQ ID NO: 29087 - DNA, 20 bp, Artificial Sequence
  Description of Artificial Sequence: Synthetic oligonucleotide
  Target: COL7A1; (+) strand; PAM type: YTN; PAM sequence: CTG
ctccccggccccaggtcggt

SEQ ID NO: 29088 - DNA, 20 bp, Artificial Sequence
  Description of Artificial Sequence: Synthetic oligonucleotide
  Target: COL7A1; (+) strand; PAM type: YTN; PAM sequence: CTC
cccggccccaggtcggtcag

SEQ ID NO: 29089 - DNA, 20 bp, Artificial Sequence
  Description of Artificial Sequence: Synthetic oligonucleotide
  Target: COL7A1; (+) strand; PAM type: YTN; PAM sequence: CTG
cctcctaacgagcctctgtc

SEQ ID NO: 29090 - DNA, 20 bp, Artificial Sequence
  Description of Artificial Sequence: Synthetic oligonucleotide
  Target: COL7A1; (+) strand; PAM type: YTN; PAM sequence: CTC
ctaacgagcctctgtccatc

SEQ ID NO: 29091 - DNA, 20 bp, Artificial Sequence
  Description of Artificial Sequence: Synthetic oligonucleotide
  Target: COL7A1; (+) strand; PAM type: YTN; PAM sequence: CTA
acgagcctctgtccatcctg

SEQ ID NO: 29092 - DNA, 20 bp, Artificial Sequence
  Description of Artificial Sequence: Synthetic oligonucleotide
  Target: COL7A1; (+) strand; PAM type: YTN; PAM sequence: CTC
tgtccatcctgcaaccaaac

SEQ ID NO: 29093 - DNA, 20 bp, Artificial Sequence
  Description of Artificial Sequence: Synthetic oligonucleotide
  Target: COL7A1; (+) strand; PAM type: YTN; PAM sequence: CTG
tccatcctgcaaccaaactg

SEQ ID NO: 29094 - DNA, 20 bp, Artificial Sequence
  Description of Artificial Sequence: Synthetic oligonucleotide
  Target: COL7A1; (+) strand; PAM type: YTN; PAM sequence: CTG
caaccaaactggccagggcc

SEQ ID NO: 29095 - DNA, 20 bp, Artificial Sequence
  Description of Artificial Sequence: Synthetic oligonucleotide
  Target: COL7A1; (+) strand; PAM type: YTN; PAM sequence: CTG
gccagggccactgccccctg

SEQ ID NO: 29096 - DNA, 20 bp, Artificial Sequence
  Description of Artificial Sequence: Synthetic oligonucleotide
  Target: COL7A1; (+) strand; PAM type: YTN; PAM sequence: CTG
ccccctgcagctccagagtg

SEQ ID NO: 29097 - DNA, 20 bp, Artificial Sequence
  Description of Artificial Sequence: Synthetic oligonucleotide
  Target: COL7A1; (+) strand; PAM type: YTN; PAM sequence: CTG
cagctccagagtggggtaac

SEQ ID NO: 29098 - DNA, 20 bp, Artificial Sequence
  Description of Artificial Sequence: Synthetic oligonucleotide
  Target: COL7A1; (+) strand; PAM type: YTN; PAM sequence: CTC
cagagtggggtaaccccgcc

SEQ ID NO: 29099 - DNA, 20 bp, Artificial Sequence
  Description of Artificial Sequence: Synthetic oligonucleotide
  Target: COL7A1; (+) strand; PAM type: YTN; PAM sequence: CTA
gcactctgaagagagagaag

SEQ ID NO: 29100 - DNA, 20 bp, Artificial Sequence
  Description of Artificial Sequence: Synthetic oligonucleotide
  Target: COL7A1; (+) strand; PAM type: YTN; PAM sequence: CTC
tgaagagagagaagcgactc

SEQ ID NO: 29101 - DNA, 20 bp, Artificial Sequence
  Description of Artificial Sequence: Synthetic oligonucleotide
  Target: COL7A1; (+) strand; PAM type: YTN; PAM sequence: CTG
aagagagagaagcgactcct

SEQ ID NO: 29102 - DNA, 20 bp, Artificial Sequence
  Description of Artificial Sequence: Synthetic oligonucleotide
  Target: COL7A1; (+) strand; PAM type: YTN; PAM sequence: CTC
ctgcggctcctgcagccccg

SEQ ID NO: 29103 - DNA, 20 bp, Artificial Sequence
  Description of Artificial Sequence: Synthetic oligonucleotide
  Target: COL7A1; (+) strand; PAM type: YTN; PAM sequence: CTG
cggctcctgcagccccgcct

SEQ ID NO: 29104 - DNA, 20 bp, Artificial Sequence
  Description of Artificial Sequence: Synthetic oligonucleotide
  Target: COL7A1; (+) strand; PAM type: YTN; PAM sequence: CTC
ctgcagccccgcctccccag

SEQ ID NO: 29105 - DNA, 20 bp, Artificial Sequence
  Description of Artificial Sequence: Synthetic oligonucleotide
  Target: COL7A1; (+) strand; PAM type: YTN; PAM sequence: CTG
cagccccgcctccccagccc

SEQ ID NO: 29106 - DNA, 20 bp, Artificial Sequence
  Description of Artificial Sequence: Synthetic oligonucleotide
  Target: COL7A1; (+) strand; PAM type: YTN; PAM sequence: CTC
cccagcccactgtaggcccg

SEQ ID NO: 29107 - DNA, 20 bp, Artificial Sequence
  Description of Artificial Sequence: Synthetic oligonucleotide
  Target: COL7A1; (+) strand; PAM type: YTN; PAM sequence: CTG
taggcccgcccccacagggc

SEQ ID NO: 29108 - DNA, 20 bp, Artificial Sequence
  Description of Artificial Sequence: Synthetic oligonucleotide
  Target: COL7A1; (+) strand; PAM type: YTN; PAM sequence: CTG
cttacaactgtgagggcagc

SEQ ID NO: 29109 - DNA, 20 bp, Artificial Sequence
  Description of Artificial Sequence: Synthetic oligonucleotide
  Target: COL7A1; (+) strand; PAM type: YTN; PAM sequence: CTT
acaactgtgagggcagcgcc

SEQ ID NO: 29110 - DNA, 20 bp, Artificial Sequence
  Description of Artificial Sequence: Synthetic oligonucleotide
  Target: COL7A1; (+) strand; PAM type: YTN; PAM sequence: TTA
caactgtgagggcagcgcca

SEQ ID NO: 29111 - DNA, 20 bp, Artificial Sequence
  Description of Artificial Sequence: Synthetic oligonucleotide
  Target: COL7A1; (+) strand; PAM type: YTN; PAM sequence: CTG
tgagggcagcgccagtgccc

SEQ ID NO: 29112 - DNA, 20 bp, Artificial Sequence
  Description of Artificial Sequence: Synthetic oligonucleotide
  Target: COL7A1; (+) strand; PAM type: YTN; PAM sequence: CTC
cagtcagccggccacgctgt

SEQ ID NO: 29113 - DNA, 20 bp, Artificial Sequence
  Description of Artificial Sequence: Synthetic oligonucleotide
  Target: COL7A1; (+) strand; PAM type: YTN; PAM sequence: CTG
tggccagtacagtctccctc

SEQ ID NO: 29114 - DNA, 20 bp, Artificial Sequence
  Description of Artificial Sequence: Synthetic oligonucleotide
  Target: COL7A1; (+) strand; PAM type: YTN; PAM sequence: CTC
cctctcccgccagagctgcc

SEQ ID NO: 29115 - DNA, 20 bp, Artificial Sequence
  Description of Artificial Sequence: Synthetic oligonucleotide
  Target: COL7A1; (+) strand; PAM type: YTN; PAM sequence: CTC
tcccgccagagctgcccatg

SEQ ID NO: 29116 - DNA, 20 bp, Artificial Sequence
  Description of Artificial Sequence: Synthetic oligonucleotide
  Target: COL7A1; (+) strand; PAM type: YTN; PAM sequence: CTC
ccgccagagctgcccatgcc

SEQ ID NO: 29117 - DNA, 20 bp, Artificial Sequence
  Description of Artificial Sequence: Synthetic oligonucleotide
  Target: COL7A1; (+) strand; PAM type: YTN; PAM sequence: CTG
cccatgccacccagcgtctg

SEQ ID NO: 29118 - DNA, 20 bp, Artificial Sequence
  Description of Artificial Sequence: Synthetic oligonucleotide
  Target: COL7A1; (+) strand; PAM type: YTN; PAM sequence: CTG
ccttcatgtccacctagagt

SEQ ID NO: 29119 - DNA, 20 bp, Artificial Sequence
  Description of Artificial Sequence: Synthetic oligonucleotide
  Target: COL7A1; (+) strand; PAM type: YTN; PAM sequence: CTT
catgtccacctagagttgtc

SEQ ID NO: 29120 - DNA, 20 bp, Artificial Sequence
  Description of Artificial Sequence: Synthetic oligonucleotide
  Target: COL7A1; (+) strand; PAM type: YTN; PAM sequence: TTC
atgtccacctagagttgtct

SEQ ID NO: 29121 - DNA, 20 bp, Artificial Sequence
  Description of Artificial Sequence: Synthetic oligonucleotide
  Target: COL7A1; (+) strand; PAM type: YTN; PAM sequence: CTA
gagttgtctgcacagcccag

SEQ ID NO: 29122 - DNA, 20 bp, Artificial Sequence
  Description of Artificial Sequence: Synthetic oligonucleotide
  Target: COL7A1; (+) strand; PAM type: YTN; PAM sequence: TTG
tctgcacagcccagagtgcc

SEQ ID NO: 29123 - DNA, 20 bp, Artificial Sequence
  Description of Artificial Sequence: Synthetic oligonucleotide
  Target: COL7A1; (+) strand; PAM type: YTN; PAM sequence: CTG
cacagcccagagtgcctgcc

SEQ ID NO: 29124 - DNA, 20 bp, Artificial Sequence
  Description of Artificial Sequence: Synthetic oligonucleotide
  Target: COL7A1; (+) strand; PAM type: YTN; PAM sequence: CTG
ccccctctgcgggcaagccc

SEQ ID NO: 29125 - DNA, 20 bp, Artificial Sequence
  Description of Artificial Sequence: Synthetic oligonucleotide
  Target: COL7A1; (+) strand; PAM type: YTN; PAM sequence: CTC
tgcgggcaagcccgtccaca

SEQ ID NO: 29126 - DNA, 20 bp, Artificial Sequence
  Description of Artificial Sequence: Synthetic oligonucleotide
  Target: COL7A1; (+) strand; PAM type: YTN; PAM sequence: CTG
cgggcaagcccgtccacact

SEQ ID NO: 29127 - DNA, 20 bp, Artificial Sequence
  Description of Artificial Sequence: Synthetic oligonucleotide
  Target: COL7A1; (+) strand; PAM type: YTN; PAM sequence: CTG
cctggaaagtcagttctgtc

SEQ ID NO: 29128 - DNA, 20 bp, Artificial Sequence
  Description of Artificial Sequence: Synthetic oligonucleotide
  Target: COL7A1; (+) strand; PAM type: YTN; PAM sequence: CTG
gaaagtcagttctgtctctg

SEQ ID NO: 29129 - DNA, 20 bp, Artificial Sequence
  Description of Artificial Sequence: Synthetic oligonucleotide
  Target: COL7A1; (+) strand; PAM type: YTN; PAM sequence: TTC
tgtctctggcccagcaatgg

SEQ ID NO: 29130 - DNA, 20 bp, Artificial Sequence
  Description of Artificial Sequence: Synthetic oligonucleotide
  Target: COL7A1; (+) strand; PAM type: YTN; PAM sequence: CTG
tctctggcccagcaatggag

SEQ ID NO: 29131 - DNA, 20 bp, Artificial Sequence
  Description of Artificial Sequence: Synthetic oligonucleotide
  Target: COL7A1; (+) strand; PAM type: YTN; PAM sequence: CTC
tggcccagcaatggagttgg

SEQ ID NO: 29132 - DNA, 20 bp, Artificial Sequence
  Description of Artificial Sequence: Synthetic oligonucleotide
  Target: COL7A1; (+) strand; PAM type: YTN; PAM sequence: CTG
gcccagcaatggagttgggc

SEQ ID NO: 29133 - DNA, 20 bp, Artificial Sequence
  Description of Artificial Sequence: Synthetic oligonucleotide
  Target: COL7A1; (+) strand; PAM type: YTN; PAM sequence: TTG
ggctgtgaaatcaggcaaaa

SEQ ID NO: 29134 - DNA, 20 bp, Artificial Sequence
  Description of Artificial Sequence: Synthetic oligonucleotide
  Target: COL7A1; (+) strand; PAM type: YTN; PAM sequence: CTG
tgaaatcaggcaaaacctag

SEQ ID NO: 29135 - DNA, 20 bp, Artificial Sequence
  Description of Artificial Sequence: Synthetic oligonucleotide
  Target: COL7A1; (+) strand; PAM type: YTN; PAM sequence: CTA
gtccttccaaaccaagggac

SEQ ID NO: 29136 - DNA, 20 bp, Artificial Sequence
  Description of Artificial Sequence: Synthetic oligonucleotide
  Target: COL7A1; (+) strand; PAM type: YTN; PAM sequence: CTT
ccaaaccaagggaccaggtc

SEQ ID NO: 29137 - DNA, 20 bp, Artificial Sequence
  Description of Artificial Sequence: Synthetic oligonucleotide
  Target: COL7A1; (+) strand; PAM type: YTN; PAM sequence: TTC
caaaccaagggaccaggtca

SEQ ID NO: 29138 - DNA, 20 bp, Artificial Sequence
  Description of Artificial Sequence: Synthetic oligonucleotide
  Target: COL7A1; (+) strand; PAM type: YTN; PAM sequence: TTA
accggggagctagggaggaa

SEQ ID NO: 29139 - DNA, 20 bp, Artificial Sequence
  Description of Artificial Sequence: Synthetic oligonucleotide
  Target: COL7A1; (+) strand; PAM type: YTN; PAM sequence: CTA
gggaggaaggcagagaagcc

SEQ ID NO: 29140 - DNA, 20 bp, Artificial Sequence
  Description of Artificial Sequence: Synthetic oligonucleotide
  Target: COL7A1; (+) strand; PAM type: YTN; PAM sequence: CTC
acccaccatgtgtcgcggcc

SEQ ID NO: 29141 - DNA, 20 bp, Artificial Sequence
  Description of Artificial Sequence: Synthetic oligonucleotide
  Target: COL7A1; (+) strand; PAM type: YTN; PAM sequence: CTG
ggtgcacaccactgggattc

SEQ ID NO: 29142 - DNA, 20 bp, Artificial Sequence
  Description of Artificial Sequence: Synthetic oligonucleotide
  Target: COL7A1; (+) strand; PAM type: YTN; PAM sequence: CTG
ggattctcgcacatcccatc

SEQ ID NO: 29143 - DNA, 20 bp, Artificial Sequence
  Description of Artificial Sequence: Synthetic oligonucleotide
  Target: COL7A1; (+) strand; PAM type: YTN; PAM sequence: TTC
tcgcacatcccatccttcag

SEQ ID NO: 29144 - DNA, 20 bp, Artificial Sequence
  Description of Artificial Sequence: Synthetic oligonucleotide
  Target: COL7A1; (+) strand; PAM type: YTN; PAM sequence: CTC
gcacatcccatccttcagtc

SEQ ID NO: 29145 - DNA, 20 bp, Artificial Sequence
  Description of Artificial Sequence: Synthetic oligonucleotide
  Target: COL7A1; (+) strand; PAM type: YTN; PAM sequence: CTT
cagtcgctttgtgtttattg

SEQ ID NO: 29146 - DNA, 20 bp, Artificial Sequence
  Description of Artificial Sequence: Synthetic oligonucleotide
  Target: COL7A1; (+) strand; PAM type: YTN; PAM sequence: TTC
agtcgctttgtgtttattga

SEQ ID NO: 29147 - DNA, 20 bp, Artificial Sequence
  Description of Artificial Sequence: Synthetic oligonucleotide
  Target: COL7A1; (+) strand; PAM type: YTN; PAM sequence: CTT
tgtgtttattgagcacctcc

SEQ ID NO: 29148 - DNA, 20 bp, Artificial Sequence
  Description of Artificial Sequence: Synthetic oligonucleotide
  Target: COL7A1; (+) strand; PAM type: YTN; PAM sequence: TTT
gtgtttattgagcacctcct

SEQ ID NO: 29149 - DNA, 20 bp, Artificial Sequence
  Description of Artificial Sequence: Synthetic oligonucleotide
  Target: COL7A1; (+) strand; PAM type: YTN; PAM sequence: TTG
tgtttattgagcacctcctg

SEQ ID NO: 29150 - DNA, 20 bp, Artificial Sequence
  Description of Artificial Sequence: Synthetic oligonucleotide
  Target: COL7A1; (+) strand; PAM type: YTN; PAM sequence: TTT
attgagcacctcctgctgca

SEQ ID NO: 29151 - DNA, 20 bp, Artificial Sequence
  Description of Artificial Sequence: Synthetic oligonucleotide
  Target: COL7A1; (+) strand; PAM type: YTN; PAM sequence: TTA
ttgagcacctcctgctgcag

SEQ ID NO: 29152 - DNA, 20 bp, Artificial Sequence
  Description of Artificial Sequence: Synthetic oligonucleotide
  Target: COL7A1; (+) strand; PAM type: YTN; PAM sequence: TTG
agcacctcctgctgcaggac

SEQ ID NO: 29153 - DNA, 20 bp, Artificial Sequence
  Description of Artificial Sequence: Synthetic oligonucleotide
  Target: COL7A1; (+) strand; PAM type: YTN; PAM sequence: CTC
ctgctgcaggacctccatgt

SEQ ID NO: 29154 - DNA, 20 bp, Artificial Sequence
  Description of Artificial Sequence: Synthetic oligonucleotide
  Target: COL7A1; (+) strand; PAM type: YTN; PAM sequence: CTG
ctgcaggacctccatgtctg

SEQ ID NO: 29155 - DNA, 20 bp, Artificial Sequence
  Description of Artificial Sequence: Synthetic oligonucleotide
  Target: COL7A1; (+) strand; PAM type: YTN; PAM sequence: CTG
caggacctccatgtctgcta

SEQ ID NO: 29156 - DNA, 20 bp, Artificial Sequence
  Description of Artificial Sequence: Synthetic oligonucleotide
  Target: COL7A1; (+) strand; PAM type: YTN; PAM sequence: CTC
catgtctgctacatacacaa

SEQ ID NO: 29157 - DNA, 20 bp, Artificial Sequence
  Description of Artificial Sequence: Synthetic oligonucleotide
  Target: COL7A1; (+) strand; PAM type: YTN; PAM sequence: CTG
ctacatacacaatgctcaca

SEQ ID NO: 29158 - DNA, 20 bp, Artificial Sequence
  Description of Artificial Sequence: Synthetic oligonucleotide
  Target: COL7A1; (+) strand; PAM type: YTN; PAM sequence: CTA
catacacaatgctcacaggc

SEQ ID NO: 29159 - DNA, 20 bp, Artificial Sequence
  Description of Artificial Sequence: Synthetic oligonucleotide
  Target: COL7A1; (+) strand; PAM type: YTN; PAM sequence: CTC
acaggcttgctggtcccatc

SEQ ID NO: 29160 - DNA, 20 bp, Artificial Sequence
  Description of Artificial Sequence: Synthetic oligonucleotide
  Target: COL7A1; (+) strand; PAM type: YTN; PAM sequence: CTT
gctggtcccatccttcagtc

SEQ ID NO: 29161 - DNA, 20 bp, Artificial Sequence
  Description of Artificial Sequence: Synthetic oligonucleotide
  Target: COL7A1; (+) strand; PAM type: YTN; PAM sequence: TTG
ctggtcccatccttcagtcg

SEQ ID NO: 29162 - DNA, 20 bp, Artificial Sequence
  Description of Artificial Sequence: Synthetic oligonucleotide
  Target: COL7A1; (+) strand; PAM type: YTN; PAM sequence: CTG
gtcccatccttcagtcgctt

SEQ ID NO: 29163 - DNA, 20 bp, Artificial Sequence
  Description of Artificial Sequence: Synthetic oligonucleotide
  Target: COL7A1; (+) strand; PAM type: YTN; PAM sequence: CTT
cagtcgctttgtgtttattg

SEQ ID NO: 29164 - DNA, 20 bp, Artificial Sequence
  Description of Artificial Sequence: Synthetic oligonucleotide
  Target: COL7A1; (+) strand; PAM type: YTN; PAM sequence: TTC
agtcgctttgtgtttattga

SEQ ID NO: 29165 - DNA, 20 bp, Artificial Sequence
  Description of Artificial Sequence: Synthetic oligonucleotide
  Target: COL7A1; (+) strand; PAM type: YTN; PAM sequence: CTT
tgtgtttattgagcacctcc

SEQ ID NO: 29166 - DNA, 20 bp, Artificial Sequence
  Description of Artificial Sequence: Synthetic oligonucleotide
  Target: COL7A1; (+) strand; PAM type: YTN; PAM sequence: TTT
gtgtttattgagcacctcct

SEQ ID NO: 29167 - DNA, 20 bp, Artificial Sequence
  Description of Artificial Sequence: Synthetic oligonucleotide
  Target: COL7A1; (+) strand; PAM type: YTN; PAM sequence: TTG
tgtttattgagcacctcctg

SEQ ID NO: 29168 - DNA, 20 bp, Artificial Sequence
  Description of Artificial Sequence: Synthetic oligonucleotide
  Target: COL7A1; (+) strand; PAM type: YTN; PAM sequence: TTT
attgagcacctcctgctgca

SEQ ID NO: 29169 - DNA, 20 bp, Artificial Sequence
  Description of Artificial Sequence: Synthetic oligonucleotide
  Target: COL7A1; (+) strand; PAM type: YTN; PAM sequence: TTA
ttgagcacctcctgctgcag

SEQ ID NO: 29170 - DNA, 20 bp, Artificial Sequence
  Description of Artificial Sequence: Synthetic oligonucleotide
  Target: COL7A1; (+) strand; PAM type: YTN; PAM sequence: TTG
agcacctcctgctgcaggac

SEQ ID NO: 29171 - DNA, 20 bp, Artificial Sequence
  Description of Artificial Sequence: Synthetic oligonucleotide
  Target: COL7A1; (+) strand; PAM type: YTN; PAM sequence: CTC
ctgctgcaggacctccatgt

SEQ ID NO: 29172 - DNA, 20 bp, Artificial Sequence
  Description of Artificial Sequence: Synthetic oligonucleotide
  Target: COL7A1; (+) strand; PAM type: YTN; PAM sequence: CTG
ctgcaggacctccatgtctg

SEQ ID NO: 29173 - DNA, 20 bp, Artificial Sequence
  Description of Artificial Sequence: Synthetic oligonucleotide
  Target: COL7A1; (+) strand; PAM type: YTN; PAM sequence: CTG
caggacctccatgtctgcta

SEQ ID NO: 29174 - DNA, 20 bp, Artificial Sequence
  Description of Artificial Sequence: Synthetic oligonucleotide
  Target: COL7A1; (+) strand; PAM type: YTN; PAM sequence: CTC
catgtctgctatatacacaa

SEQ ID NO: 29175 - DNA, 20 bp, Artificial Sequence
  Description of Artificial Sequence: Synthetic oligonucleotide
  Target: COL7A1; (+) strand; PAM type: YTN; PAM sequence: CTG
ctatatacacaatgctcaca

SEQ ID NO: 29176 - DNA, 20 bp, Artificial Sequence
  Description of Artificial Sequence: Synthetic oligonucleotide
  Target: COL7A1; (+) strand; PAM type: YTN; PAM sequence: CTA
tatacacaatgctcacaggc

SEQ ID NO: 29177 - DNA, 20 bp, Artificial Sequence
  Description of Artificial Sequence: Synthetic oligonucleotide
  Target: COL7A1; (+) strand; PAM type: YTN; PAM sequence: CTC
acaggcttgctggtgtcgct

SEQ ID NO: 29178 - DNA, 20 bp, Artificial Sequence
  Description of Artificial Sequence: Synthetic oligonucleotide
  Target: COL7A1; (+) strand; PAM type: YTN; PAM sequence: CTT
gctggtgtcgctttgcttta

SEQ ID NO: 29179 - DNA, 20 bp, Artificial Sequence
  Description of Artificial Sequence: Synthetic oligonucleotide
  Target: COL7A1; (+) strand; PAM type: YTN; PAM sequence: TTG
ctggtgtcgctttgctttac

SEQ ID NO: 29180 - DNA, 20 bp, Artificial Sequence
  Description of Artificial Sequence: Synthetic oligonucleotide
  Target: COL7A1; (+) strand; PAM type: YTN; PAM sequence: CTG
gtgtcgctttgctttacaga

SEQ ID NO: 29181 - DNA, 20 bp, Artificial Sequence
  Description of Artificial Sequence: Synthetic oligonucleotide
  Target: COL7A1; (+) strand; PAM type: YTN; PAM sequence: CTT
tgctttacagataaggaaac

SEQ ID NO: 29182 - DNA, 20 bp, Artificial Sequence
  Description of Artificial Sequence: Synthetic oligonucleotide
  Target: COL7A1; (+) strand; PAM type: YTN; PAM sequence: TTT
gctttacagataaggaaacc

SEQ ID NO: 29183 - DNA, 20 bp, Artificial Sequence
  Description of Artificial Sequence: Synthetic oligonucleotide
  Target: COL7A1; (+) strand; PAM type: YTN; PAM sequence: TTG
ctttacagataaggaaaccg

SEQ ID NO: 29184 - DNA, 20 bp, Artificial Sequence
  Description of Artificial Sequence: Synthetic oligonucleotide
  Target: COL7A1; (+) strand; PAM type: YTN; PAM sequence: CTT
tacagataaggaaaccgagg

SEQ ID NO: 29185 - DNA, 20 bp, Artificial Sequence
  Description of Artificial Sequence: Synthetic oligonucleotide
  Target: COL7A1; (+) strand; PAM type: YTN; PAM sequence: TTT
acagataaggaaaccgaggc

SEQ ID NO: 29186 - DNA, 20 bp, Artificial Sequence
  Description of Artificial Sequence: Synthetic oligonucleotide
  Target: COL7A1; (+) strand; PAM type: YTN; PAM sequence: TTA
cagataaggaaaccgaggct

SEQ ID NO: 29187 - DNA, 20 bp, Artificial Sequence
  Description of Artificial Sequence: Synthetic oligonucleotide
  Target: COL7A1; (+) strand; PAM type: YTN; PAM sequence: CTC
ggaaaggtgaacacctttgc

SEQ ID NO: 29188 - DNA, 20 bp, Artificial Sequence
  Description of Artificial Sequence: Synthetic oligonucleotide
  Target: COL7A1; (+) strand; PAM type: YTN; PAM sequence: CTT
tgcccaggacagtccgtgcg

SEQ ID NO: 29189 - DNA, 20 bp, Artificial Sequence
  Description of Artificial Sequence: Synthetic oligonucleotide
  Target: COL7A1; (+) strand; PAM type: YTN; PAM sequence: TTT
gcccaggacagtccgtgcgt

SEQ ID NO: 29190 - DNA, 20 bp, Artificial Sequence
  Description of Artificial Sequence: Synthetic oligonucleotide
  Target: COL7A1; (+) strand; PAM type: YTN; PAM sequence: TTG
cccaggacagtccgtgcgtg

SEQ ID NO: 29191 - DNA, 20 bp, Artificial Sequence
  Description of Artificial Sequence: Synthetic oligonucleotide
  Target: COL7A1; (+) strand; PAM type: YTN; PAM sequence: TTT
ggttggagctccggcagcct

SEQ ID NO: 29192 - DNA, 20 bp, Artificial Sequence
  Description of Artificial Sequence: Synthetic oligonucleotide
  Target: COL7A1; (+) strand; PAM type: YTN; PAM sequence: TTG
gttggagctccggcagcctg

SEQ ID NO: 29193 - DNA, 20 bp, Artificial Sequence
  Description of Artificial Sequence: Synthetic oligonucleotide
  Target: COL7A1; (+) strand; PAM type: YTN; PAM sequence: TTG
gagctccggcagcctgagcc

SEQ ID NO: 29194 - DNA, 20 bp, Artificial Sequence
  Description of Artificial Sequence: Synthetic oligonucleotide
  Target: COL7A1; (+) strand; PAM type: YTN; PAM sequence: CTC
cggcagcctgagccctgtct

SEQ ID NO: 29195 - DNA, 20 bp, Artificial Sequence
  Description of Artificial Sequence: Synthetic oligonucleotide
  Target: COL7A1; (+) strand; PAM type: YTN; PAM sequence: CTG
agccctgtctcctgtgagcc

SEQ ID NO: 29196 - DNA, 20 bp, Artificial Sequence
  Description of Artificial Sequence: Synthetic oligonucleotide
  Target: COL7A1; (+) strand; PAM type: YTN; PAM sequence: CTG
tctcctgtgagccctgcatg

SEQ ID NO: 29197 - DNA, 20 bp, Artificial Sequence
  Description of Artificial Sequence: Synthetic oligonucleotide
  Target: COL7A1; (+) strand; PAM type: YTN; PAM sequence: CTC
ctgtgagccctgcatgtccc

SEQ ID NO: 29198 - DNA, 20 bp, Artificial Sequence
  Description of Artificial Sequence: Synthetic oligonucleotide
  Target: COL7A1; (+) strand; PAM type: YTN; PAM sequence: CTG
tgagccctgcatgtccctgg

SEQ ID NO: 29199 - DNA, 20 bp, Artificial Sequence
  Description of Artificial Sequence: Synthetic oligonucleotide
  Target: COL7A1; (+) strand; PAM type: YTN; PAM sequence: CTG
catgtccctgggtcgaggct

SEQ ID NO: 29200 - DNA, 20 bp, Artificial Sequence
  Description of Artificial Sequence: Synthetic oligonucleotide
  Target: COL7A1; (+) strand; PAM type: YTN; PAM sequence: CTG
ggtcgaggctggggatgcag

SEQ ID NO: 29201 - DNA, 20 bp, Artificial Sequence
  Description of Artificial Sequence: Synthetic oligonucleotide
  Target: COL7A1; (+) strand; PAM type: YTN; PAM sequence: CTG
gggatgcaggggtacgtggg

SEQ ID NO: 29202 - DNA, 20 bp, Artificial Sequence
  Description of Artificial Sequence: Synthetic oligonucleotide
  Target: COL7A1; (+) strand; PAM type: YTN; PAM sequence: CTG
gccaggagttgttcttgctt

SEQ ID NO: 29203 - DNA, 20 bp, Artificial Sequence
  Description of Artificial Sequence: Synthetic oligonucleotide
  Target: COL7A1; (+) strand; PAM type: YTN; PAM sequence: TTG
ttcttgcttcatgcaggttt

SEQ ID NO: 29204 - DNA, 20 bp, Artificial Sequence
  Description of Artificial Sequence: Synthetic oligonucleotide
  Target: COL7A1; (+) strand; PAM type: YTN; PAM sequence: TTC
ttgcttcatgcaggtttggg

SEQ ID NO: 29205 - DNA, 20 bp, Artificial Sequence
  Description of Artificial Sequence: Synthetic oligonucleotide
  Target: COL7A1; (+) strand; PAM type: YTN; PAM sequence: CTT
gcttcatgcaggtttggggg

SEQ ID NO: 29206 - DNA, 20 bp, Artificial Sequence
  Description of Artificial Sequence: Synthetic oligonucleotide
  Target: COL7A1; (+) strand; PAM type: YTN; PAM sequence: TTG
cttcatgcaggtttggggga

SEQ ID NO: 29207 - DNA, 20 bp, Artificial Sequence
  Description of Artificial Sequence: Synthetic oligonucleotide
  Target: COL7A1; (+) strand; PAM type: YTN; PAM sequence: CTT
catgcaggtttgggggacaa

SEQ ID NO: 29208 - DNA, 20 bp, Artificial Sequence
  Description of Artificial Sequence: Synthetic oligonucleotide
  Target: COL7A1; (+) strand; PAM type: YTN; PAM sequence: TTC
atgcaggtttgggggacaag

SEQ ID NO: 29209 - DNA, 20 bp, Artificial Sequence
  Description of Artificial Sequence: Synthetic oligonucleotide
  Target: COL7A1; (+) strand; PAM type: YTN; PAM sequence: TTT
gggggacaagcacccactcc

SEQ ID NO: 29210 - DNA, 20 bp, Artificial Sequence
  Description of Artificial Sequence: Synthetic oligonucleotide
  Target: COL7A1; (+) strand; PAM type: YTN; PAM sequence: TTG
ggggacaagcacccactcct

SEQ ID NO: 29211 - DNA, 20 bp, Artificial Sequence
  Description of Artificial Sequence: Synthetic oligonucleotide
  Target: COL7A1; (+) strand; PAM type: YTN; PAM sequence: CTC
ctctcagacccctcacgtac

SEQ ID NO: 29212 - DNA, 20 bp, Artificial Sequence
  Description of Artificial Sequence: Synthetic oligonucleotide
  Target: COL7A1; (+) strand; PAM type: YTN; PAM sequence: CTC
tcagacccctcacgtaccct

SEQ ID NO: 29213 - DNA, 20 bp, Artificial Sequence
  Description of Artificial Sequence: Synthetic oligonucleotide
  Target: COL7A1; (+) strand; PAM type: YTN; PAM sequence: CTC
agacccctcacgtaccctta

SEQ ID NO: 29214 - DNA, 20 bp, Artificial Sequence
  Description of Artificial Sequence: Synthetic oligonucleotide
  Target: COL7A1; (+) strand; PAM type: YTN; PAM sequence: CTC
acgtacccttaccctgctca

SEQ ID NO: 29215 - DNA, 20 bp, Artificial Sequence
  Description of Artificial Sequence: Synthetic oligonucleotide
  Target: COL7A1; (+) strand; PAM type: YTN; PAM sequence: CTT
accctgctcacacacactca

SEQ ID NO: 29216 - DNA, 20 bp, Artificial Sequence
  Description of Artificial Sequence: Synthetic oligonucleotide
  Target: COL7A1; (+) strand; PAM type: YTN; PAM sequence: TTA
ccctgctcacacacactcac

SEQ ID NO: 29217 - DNA, 20 bp, Artificial Sequence
  Description of Artificial Sequence: Synthetic oligonucleotide
  Target: COL7A1; (+) strand; PAM type: YTN; PAM sequence: CTG
ctcacacacactcacagctg

SEQ ID NO: 29218 - DNA, 20 bp, Artificial Sequence
  Description of Artificial Sequence: Synthetic oligonucleotide
  Target: COL7A1; (+) strand; PAM type: YTN; PAM sequence: CTC
acacacactcacagctgtca

SEQ ID NO: 29219 - DNA, 20 bp, Artificial Sequence
  Description of Artificial Sequence: Synthetic oligonucleotide
  Target: COL7A1; (+) strand; PAM type: YTN; PAM sequence: CTC
acagctgtcagagactcagc

SEQ ID NO: 29220 - DNA, 20 bp, Artificial Sequence
  Description of Artificial Sequence: Synthetic oligonucleotide
  Target: COL7A1; (+) strand; PAM type: YTN; PAM sequence: CTG
tcagagactcagccacacac

SEQ ID NO: 29221 - DNA, 20 bp, Artificial Sequence
  Description of Artificial Sequence: Synthetic oligonucleotide
  Target: COL7A1; (+) strand; PAM type: YTN; PAM sequence: CTC
agccacacacgcacatatgc

SEQ ID NO: 29222 - DNA, 20 bp, Artificial Sequence
  Description of Artificial Sequence: Synthetic oligonucleotide
  Target: COL7A1; (+) strand; PAM type: YTN; PAM sequence: CTG
ccatggtcacaggcttcctg

SEQ ID NO: 29223 - DNA, 20 bp, Artificial Sequence
  Description of Artificial Sequence: Synthetic oligonucleotide
  Target: COL7A1; (+) strand; PAM type: YTN; PAM sequence: CTT
cctgtgttcgggcctttgtg

SEQ ID NO: 29224 - DNA, 20 bp, Artificial Sequence
  Description of Artificial Sequence: Synthetic oligonucleotide
  Target: COL7A1; (+) strand; PAM type: YTN; PAM sequence: TTC
ctgtgttcgggcctttgtgc

SEQ ID NO: 29225 - DNA, 20 bp, Artificial Sequence
  Description of Artificial Sequence: Synthetic oligonucleotide
  Target: COL7A1; (+) strand; PAM type: YTN; PAM sequence: CTG
tgttcgggcctttgtgcctg

SEQ ID NO: 29226 - DNA, 20 bp, Artificial Sequence
  Description of Artificial Sequence: Synthetic oligonucleotide
  Target: COL7A1; (+) strand; PAM type: YTN; PAM sequence: TTC
gggcctttgtgcctggagac

SEQ ID NO: 29227 - DNA, 20 bp, Artificial Sequence
  Description of Artificial Sequence: Synthetic oligonucleotide
  Target: COL7A1; (+) strand; PAM type: YTN; PAM sequence: CTT
tgtgcctggagacacccctc

SEQ ID NO: 29228 - DNA, 20 bp, Artificial Sequence
  Description of Artificial Sequence: Synthetic oligonucleotide
  Target: COL7A1; (+) strand; PAM type: YTN; PAM sequence: TTT
gtgcctggagacacccctca

SEQ ID NO: 29229 - DNA, 20 bp, Artificial Sequence
  Description of Artificial Sequence: Synthetic oligonucleotide
  Target: COL7A1; (+) strand; PAM type: YTN; PAM sequence: TTG
tgcctggagacacccctcac

SEQ ID NO: 29230 - DNA, 20 bp, Artificial Sequence
  Description of Artificial Sequence: Synthetic oligonucleotide
  Target: COL7A1; (+) strand; PAM type: YTN; PAM sequence: CTG
gagacacccctcacagcccc

SEQ ID NO: 29231 - DNA, 20 bp, Artificial Sequence
  Description of Artificial Sequence: Synthetic oligonucleotide
  Target: COL7A1; (+) strand; PAM type: YTN; PAM sequence: CTC
acagccccgtccatctgggg

SEQ ID NO: 29232 - DNA, 20 bp, Artificial Sequence
  Description of Artificial Sequence: Synthetic oligonucleotide
  Target: COL7A1; (+) strand; PAM type: YTN; PAM sequence: CTG
gggcaggtgctgcctcatgg

SEQ ID NO: 29233 - DNA, 20 bp, Artificial Sequence
  Description of Artificial Sequence: Synthetic oligonucleotide
  Target: COL7A1; (+) strand; PAM type: YTN; PAM sequence: CTG
cctcatggggcacagagcaa

SEQ ID NO: 29234 - DNA, 20 bp, Artificial Sequence
  Description of Artificial Sequence: Synthetic oligonucleotide
  Target: COL7A1; (+) strand; PAM type: YTN; PAM sequence: CTC
atggggcacagagcaagcaa

SEQ ID NO: 29235 - DNA, 20 bp, Artificial Sequence
  Description of Artificial Sequence: Synthetic oligonucleotide
  Target: COL7A1; (+) strand; PAM type: YTN; PAM sequence: CTC
agccagcatttctctgtgtg

SEQ ID NO: 29236 - DNA, 20 bp, Artificial Sequence
  Description of Artificial Sequence: Synthetic oligonucleotide
  Target: COL7A1; (+) strand; PAM type: YTN; PAM sequence: TTT
ctctgtgtggtggcctatgg

SEQ ID NO: 29237 - DNA, 20 bp, Artificial Sequence
  Description of Artificial Sequence: Synthetic oligonucleotide
  Target: COL7A1; (+) strand; PAM type: YTN; PAM sequence: TTC
tctgtgtggtggcctatggg

SEQ ID NO: 29238 - DNA, 20 bp, Artificial Sequence
  Description of Artificial Sequence: Synthetic oligonucleotide
  Target: COL7A1; (+) strand; PAM type: YTN; PAM sequence: CTC
tgtgtggtggcctatgggat

SEQ ID NO: 29239 - DNA, 20 bp, Artificial Sequence
  Description of Artificial Sequence: Synthetic oligonucleotide
  Target: COL7A1; (+) strand; PAM type: YTN; PAM sequence: CTG
tgtggtggcctatgggatga

SEQ ID NO: 29240 - DNA, 20 bp, Artificial Sequence
  Description of Artificial Sequence: Synthetic oligonucleotide
  Target: COL7A1; (+) strand; PAM type: YTN; PAM sequence: CTA
tgggatgacagacctgtggg

SEQ ID NO: 29241 - DNA, 20 bp, Artificial Sequence
  Description of Artificial Sequence: Synthetic oligonucleotide
  Target: COL7A1; (+) strand; PAM type: YTN; PAM sequence: CTG
tgggcctcagagggactggt

SEQ ID NO: 29242 - DNA, 20 bp, Artificial Sequence
  Description of Artificial Sequence: Synthetic oligonucleotide
  Target: COL7A1; (+) strand; PAM type: YTN; PAM sequence: CTC
agagggactggtcggaggca

SEQ ID NO: 29243 - DNA, 20 bp, Artificial Sequence
  Description of Artificial Sequence: Synthetic oligonucleotide
  Target: COL7A1; (+) strand; PAM type: YTN; PAM sequence: CTG
gtcggaggcagtgttgagct

SEQ ID NO: 29244 - DNA, 20 bp, Artificial Sequence
  Description of Artificial Sequence: Synthetic oligonucleotide
  Target: COL7A1; (+) strand; PAM type: YTN; PAM sequence: TTG
agctctcgtgttgaggctcc

SEQ ID NO: 29245 - DNA, 20 bp, Artificial Sequence
  Description of Artificial Sequence: Synthetic oligonucleotide
  Target: COL7A1; (+) strand; PAM type: YTN; PAM sequence: CTC
tcgtgttgaggctcctgaaa

SEQ ID NO: 29246 - DNA, 20 bp, Artificial Sequence
  Description of Artificial Sequence: Synthetic oligonucleotide
  Target: COL7A1; (+) strand; PAM type: YTN; PAM sequence: CTC
gtgttgaggctcctgaaagt

SEQ ID NO: 29247 - DNA, 20 bp, Artificial Sequence
  Description of Artificial Sequence: Synthetic oligonucleotide
  Target: COL7A1; (+) strand; PAM type: YTN; PAM sequence: TTG
aggctcctgaaagtaacatg

SEQ ID NO: 29248 - DNA, 20 bp, Artificial Sequence
  Description of Artificial Sequence: Synthetic oligonucleotide
  Target: COL7A1; (+) strand; PAM type: YTN; PAM sequence: CTC
ctgaaagtaacatgatgatg

SEQ ID NO: 29249 - DNA, 20 bp, Artificial Sequence
  Description of Artificial Sequence: Synthetic oligonucleotide
  Target: COL7A1; (+) strand; PAM type: YTN; PAM sequence: CTG
aaagtaacatgatgatgact

SEQ ID NO: 29250 - DNA, 20 bp, Artificial Sequence
  Description of Artificial Sequence: Synthetic oligonucleotide
  Target: COL7A1; (+) strand; PAM type: YTN; PAM sequence: CTG
catgtggcggtgtccaggtg

SEQ ID NO: 29251 - DNA, 20 bp, Artificial Sequence
  Description of Artificial Sequence: Synthetic oligonucleotide
  Target: COL7A1; (+) strand; PAM type: YTN; PAM sequence: TTC
tgtgactatggggcacccag

SEQ ID NO: 29252 - DNA, 20 bp, Artificial Sequence
  Description of Artificial Sequence: Synthetic oligonucleotide
  Target: COL7A1; (+) strand; PAM type: YTN; PAM sequence: CTG
tgactatggggcacccagac

SEQ ID NO: 29253 - DNA, 20 bp, Artificial Sequence
  Description of Artificial Sequence: Synthetic oligonucleotide
  Target: COL7A1; (+) strand; PAM type: YTN; PAM sequence: CTA
tggggcacccagacatagca

SEQ ID NO: 29254 - DNA, 20 bp, Artificial Sequence
  Description of Artificial Sequence: Synthetic oligonucleotide
  Target: COL7A1; (+) strand; PAM type: YTN; PAM sequence: CTC
gccacagcagtgaccttacg

SEQ ID NO: 29255 - DNA, 20 bp, Artificial Sequence
  Description of Artificial Sequence: Synthetic oligonucleotide
  Target: COL7A1; (+) strand; PAM type: YTN; PAM sequence: CTT
acgtggcagcatccaagctg

SEQ ID NO: 29256 - DNA, 20 bp, Artificial Sequence
  Description of Artificial Sequence: Synthetic oligonucleotide
  Target: COL7A1; (+) strand; PAM type: YTN; PAM sequence: TTA
cgtggcagcatccaagctgt

SEQ ID NO: 29257 - DNA, 20 bp, Artificial Sequence
  Description of Artificial Sequence: Synthetic oligonucleotide
  Target: COL7A1; (+) strand; PAM type: YTN; PAM sequence: CTG
tccggacatatattaggtct

SEQ ID NO: 29258 - DNA, 20 bp, Artificial Sequence
  Description of Artificial Sequence: Synthetic oligonucleotide
  Target: COL7A1; (+) strand; PAM type: YTN; PAM sequence: TTA
ggtctgtggggcacacaggc

SEQ ID NO: 29259 - DNA, 20 bp, Artificial Sequence
  Description of Artificial Sequence: Synthetic oligonucleotide
  Target: COL7A1; (+) strand; PAM type: YTN; PAM sequence: CTG
tggggcacacaggcatggca

SEQ ID NO: 29260 - DNA, 20 bp, Artificial Sequence
  Description of Artificial Sequence: Synthetic oligonucleotide
  Target: COL7A1; (+) strand; PAM type: YTN; PAM sequence: CTC
catgtggcagtgacccaact

SEQ ID NO: 29261 - DNA, 20 bp, Artificial Sequence
  Description of Artificial Sequence: Synthetic oligonucleotide
  Target: COL7A1; (+) strand; PAM type: YTN; PAM sequence: CTT
agcaatgtccaatgtccagg

SEQ ID NO: 29262 - DNA, 20 bp, Artificial Sequence
  Description of Artificial Sequence: Synthetic oligonucleotide
  Target: COL7A1; (+) strand; PAM type: YTN; PAM sequence: TTA
gcaatgtccaatgtccaggc

SEQ ID NO: 29263 - DNA, 20 bp, Artificial Sequence
  Description of Artificial Sequence: Synthetic oligonucleotide
  Target: COL7A1; (+) strand; PAM type: YTN; PAM sequence: CTG
tccagacacactgtgactct

SEQ ID NO: 29264 - DNA, 20 bp, Artificial Sequence
  Description of Artificial Sequence: Synthetic oligonucleotide
  Target: COL7A1; (+) strand; PAM type: YTN; PAM sequence: CTG
tgactctgtggggcactcag

SEQ ID NO: 29265 - DNA, 20 bp, Artificial Sequence
  Description of Artificial Sequence: Synthetic oligonucleotide
  Target: COL7A1; (+) strand; PAM type: YTN; PAM sequence: CTC
tgtggggcactcagatctga

SEQ ID NO: 29266 - DNA, 20 bp, Artificial Sequence
  Description of Artificial Sequence: Synthetic oligonucleotide
  Target: COL7A1; (+) strand; PAM type: YTN; PAM sequence: CTG
tggggcactcagatctgata

SEQ ID NO: 29267 - DNA, 20 bp, Artificial Sequence
  Description of Artificial Sequence: Synthetic oligonucleotide
  Target: COL7A1; (+) strand; PAM type: YTN; PAM sequence: CTC
agatctgatatgacctgcat

SEQ ID NO: 29268 - DNA, 20 bp, Artificial Sequence
  Description of Artificial Sequence: Synthetic oligonucleotide
  Target: COL7A1; (+) strand; PAM type: YTN; PAM sequence: CTG
atatgacctgcatgacagtg

SEQ ID NO: 29269 - DNA, 20 bp, Artificial Sequence
  Description of Artificial Sequence: Synthetic oligonucleotide
  Target: COL7A1; (+) strand; PAM type: YTN; PAM sequence: CTG
catgacagtggctccatgtg

SEQ ID NO: 29270 - DNA, 20 bp, Artificial Sequence
  Description of Artificial Sequence: Synthetic oligonucleotide
  Target: COL7A1; (+) strand; PAM type: YTN; PAM sequence: CTC
catgtggcagtgtccagaca

SEQ ID NO: 29271 - DNA, 20 bp, Artificial Sequence
  Description of Artificial Sequence: Synthetic oligonucleotide
  Target: COL7A1; (+) strand; PAM type: YTN; PAM sequence: CTG
tatgcccagatgtggcagcg

SEQ ID NO: 29272 - DNA, 20 bp, Artificial Sequence
  Description of Artificial Sequence: Synthetic oligonucleotide
  Target: COL7A1; (+) strand; PAM type: YTN; PAM sequence: CTG
tatgcccagatgtggcagca

SEQ ID NO: 29273 - DNA, 20 bp, Artificial Sequence
  Description of Artificial Sequence: Synthetic oligonucleotide
  Target: COL7A1; (+) strand; PAM type: YTN; PAM sequence: CTG
tgtggctgccctccaggtct

SEQ ID NO: 29274 - DNA, 20 bp, Artificial Sequence
  Description of Artificial Sequence: Synthetic oligonucleotide
  Target: COL7A1; (+) strand; PAM type: YTN; PAM sequence: CTG
ccctccaggtcttcccatcc

SEQ ID NO: 29275 - DNA, 20 bp, Artificial Sequence
  Description of Artificial Sequence: Synthetic oligonucleotide
  Target: COL7A1; (+) strand; PAM type: YTN; PAM sequence: CTC
caggtcttcccatccagggt

SEQ ID NO: 29276 - DNA, 20 bp, Artificial Sequence
  Description of Artificial Sequence: Synthetic oligonucleotide
  Target: COL7A1; (+) strand; PAM type: YTN; PAM sequence: CTT
cccatccagggtggccctat

SEQ ID NO: 29277 - DNA, 20 bp, Artificial Sequence
  Description of Artificial Sequence: Synthetic oligonucleotide
  Target: COL7A1; (+) strand; PAM type: YTN; PAM sequence: TTC
ccatccagggtggccctatc

SEQ ID NO: 29278 - DNA, 20 bp, Artificial Sequence
  Description of Artificial Sequence: Synthetic oligonucleotide
  Target: COL7A1; (+) strand; PAM type: YTN; PAM sequence: CTA
tcactgtgaccccctctctc

SEQ ID NO: 29279 - DNA, 20 bp, Artificial Sequence
  Description of Artificial Sequence: Synthetic oligonucleotide
  Target: COL7A1; (+) strand; PAM type: YTN; PAM sequence: CTG
tgaccccctctctcaggctc

SEQ ID NO: 29280 - DNA, 20 bp, Artificial Sequence
  Description of Artificial Sequence: Synthetic oligonucleotide
  Target: COL7A1; (+) strand; PAM type: YTN; PAM sequence: CTC
tctcaggctcagcagtggcc

SEQ ID NO: 29281 - DNA, 20 bp, Artificial Sequence
  Description of Artificial Sequence: Synthetic oligonucleotide
  Target: COL7A1; (+) strand; PAM type: YTN; PAM sequence: CTC
tcaggctcagcagtggccga

SEQ ID NO: 29282 - DNA, 20 bp, Artificial Sequence
  Description of Artificial Sequence: Synthetic oligonucleotide
  Target: COL7A1; (+) strand; PAM type: YTN; PAM sequence: CTC
aggctcagcagtggccgaca

SEQ ID NO: 29283 - DNA, 20 bp, Artificial Sequence
  Description of Artificial Sequence: Synthetic oligonucleotide
  Target: COL7A1; (+) strand; PAM type: YTN; PAM sequence: CTC
agcagtggccgacacgggcc

SEQ ID NO: 29284 - DNA, 20 bp, Artificial Sequence
  Description of Artificial Sequence: Synthetic oligonucleotide
  Target: COL7A1; (+) strand; PAM type: YTN; PAM sequence: TTG
gtggtggcctgctccctggc

SEQ ID NO: 29285 - DNA, 20 bp, Artificial Sequence
  Description of Artificial Sequence: Synthetic oligonucleotide
  Target: COL7A1; (+) strand; PAM type: YTN; PAM sequence: CTG
ctccctggcagccctggccc

SEQ ID NO: 29286 - DNA, 20 bp, Artificial Sequence
  Description of Artificial Sequence: Synthetic oligonucleotide
  Target: COL7A1; (+) strand; PAM type: YTN; PAM sequence: CTC
cctggcagccctggcccggg

SEQ ID NO: 29287 - DNA, 20 bp, Artificial Sequence
  Description of Artificial Sequence: Synthetic oligonucleotide
  Target: COL7A1; (+) strand; PAM type: YTN; PAM sequence: CTG
gcagccctggcccgggcttg

SEQ ID NO: 29288 - DNA, 20 bp, Artificial Sequence
  Description of Artificial Sequence: Synthetic oligonucleotide
  Target: COL7A1; (+) strand; PAM type: YTN; PAM sequence: CTG
gcccgggcttgctccagtaa

SEQ ID NO: 29289 - DNA, 20 bp, Artificial Sequence
  Description of Artificial Sequence: Synthetic oligonucleotide
  Target: COL7A1; (+) strand; PAM type: YTN; PAM sequence: CTT
gctccagtaagatctgcaag

SEQ ID NO: 29290 - DNA, 20 bp, Artificial Sequence
  Description of Artificial Sequence: Synthetic oligonucleotide
  Target: COL7A1; (+) strand; PAM type: YTN; PAM sequence: TTG
ctccagtaagatctgcaaga

SEQ ID NO: 29291 - DNA, 20 bp, Artificial Sequence
  Description of Artificial Sequence: Synthetic oligonucleotide
  Target: COL7A1; (+) strand; PAM type: YTN; PAM sequence: CTC
cagtaagatctgcaagaggc

SEQ ID NO: 29292 - DNA, 20 bp, Artificial Sequence
  Description of Artificial Sequence: Synthetic oligonucleotide
  Target: COL7A1; (+) strand; PAM type: YTN; PAM sequence: CTG
caagaggccgatggggacat

SEQ ID NO: 29293 - DNA, 20 bp, Artificial Sequence
  Description of Artificial Sequence: Synthetic oligonucleotide
  Target: COL7A1; (+) strand; PAM type: YTN; PAM sequence: CTG
cagtggctctgggcagccca

SEQ ID NO: 29294 - DNA, 20 bp, Artificial Sequence
  Description of Artificial Sequence: Synthetic oligonucleotide
  Target: COL7A1; (+) strand; PAM type: YTN; PAM sequence: CTC
tgggcagcccacggccatgt

SEQ ID NO: 29295 - DNA, 20 bp, Artificial Sequence
  Description of Artificial Sequence: Synthetic oligonucleotide
  Target: COL7A1; (+) strand; PAM type: YTN; PAM sequence: CTG
ggcagcccacggccatgtgg

SEQ ID NO: 29296 - DNA, 20 bp, Artificial Sequence
  Description of Artificial Sequence: Synthetic oligonucleotide
  Target: COL7A1; (+) strand; PAM type: YTN; PAM sequence: CTG
aggggctctctgaggccgca

SEQ ID NO: 29297 - DNA, 20 bp, Artificial Sequence
  Description of Artificial Sequence: Synthetic oligonucleotide
  Target: COL7A1; (+) strand; PAM type: YTN; PAM sequence: CTC
tctgaggccgcaggtcgggg

SEQ ID NO: 29298 - DNA, 20 bp, Artificial Sequence
  Description of Artificial Sequence: Synthetic oligonucleotide
  Target: COL7A1; (+) strand; PAM type: YTN; PAM sequence: CTC
tgaggccgcaggtcggggag

SEQ ID NO: 29299 - DNA, 20 bp, Artificial Sequence
  Description of Artificial Sequence: Synthetic oligonucleotide
  Target: COL7A1; (+) strand; PAM type: YTN; PAM sequence: CTG
aggccgcaggtcggggagtg

SEQ ID NO: 29300 - DNA, 20 bp, Artificial Sequence
  Description of Artificial Sequence: Synthetic oligonucleotide
  Target: COL7A1; (+) strand; PAM type: YTN; PAM sequence: CTG
gggagaattctgagggcgga

SEQ ID NO: 29301 - DNA, 20 bp, Artificial Sequence
  Description of Artificial Sequence: Synthetic oligonucleotide
  Target: COL7A1; (+) strand; PAM type: YTN; PAM sequence: TTC
tgagggcggagctggaaggt

SEQ ID NO: 29302 - DNA, 20 bp, Artificial Sequence
  Description of Artificial Sequence: Synthetic oligonucleotide
  Target: COL7A1; (+) strand; PAM type: YTN; PAM sequence: CTG
agggcggagctggaaggttg

SEQ ID NO: 29303 - DNA, 20 bp, Artificial Sequence
  Description of Artificial Sequence: Synthetic oligonucleotide
  Target: COL7A1; (+) strand; PAM type: YTN; PAM sequence: CTG
gaaggttgggataggggtca

SEQ ID NO: 29304 - DNA, 20 bp, Artificial Sequence
  Description of Artificial Sequence: Synthetic oligonucleotide
  Target: COL7A1; (+) strand; PAM type: YTN; PAM sequence: TTG
ggataggggtcactgggaca

SEQ ID NO: 29305 - DNA, 20 bp, Artificial Sequence
  Description of Artificial Sequence: Synthetic oligonucleotide
  Target: COL7A1; (+) strand; PAM type: YTN; PAM sequence: CTG
ggacaaccaggactctgccc

SEQ ID NO: 29306 - DNA, 20 bp, Artificial Sequence
  Description of Artificial Sequence: Synthetic oligonucleotide
  Target: COL7A1; (+) strand; PAM type: YTN; PAM sequence: CTC
tgcccaacatcaggaccatc

SEQ ID NO: 29307 - DNA, 20 bp, Artificial Sequence
  Description of Artificial Sequence: Synthetic oligonucleotide
  Target: COL7A1; (+) strand; PAM type: YTN; PAM sequence: CTG
cccaacatcaggaccatcag

SEQ ID NO: 29308 - DNA, 20 bp, Artificial Sequence
  Description of Artificial Sequence: Synthetic oligonucleotide
  Target: COL7A1; (+) strand; PAM type: YTN; PAM sequence: CTG
gtcatcgtgaggtcaggctg

SEQ ID NO: 29309 - DNA, 20 bp, Artificial Sequence
  Description of Artificial Sequence: Synthetic oligonucleotide
  Target: COL7A1; (+) strand; PAM type: YTN; PAM sequence: CTG
caaggagaaaatgggctcag

SEQ ID NO: 29310 - DNA, 20 bp, Artificial Sequence
  Description of Artificial Sequence: Synthetic oligonucleotide
  Target: COL7A1; (+) strand; PAM type: YTN; PAM sequence: CTC
agggcaggggctctggtcaa

SEQ ID NO: 29311 - DNA, 20 bp, Artificial Sequence
  Description of Artificial Sequence: Synthetic oligonucleotide
  Target: COL7A1; (+) strand; PAM type: YTN; PAM sequence: CTC
tggtcaactggggtccatgg

SEQ ID NO: 29312 - DNA, 20 bp, Artificial Sequence
  Description of Artificial Sequence: Synthetic oligonucleotide
  Target: COL7A1; (+) strand; PAM type: YTN; PAM sequence: CTG
gtcaactggggtccatggac

SEQ ID NO: 29313 - DNA, 20 bp, Artificial Sequence
  Description of Artificial Sequence: Synthetic oligonucleotide
  Target: COL7A1; (+) strand; PAM type: YTN; PAM sequence: CTG
gggtccatggacagagacag

SEQ ID NO: 29314 - DNA, 20 bp, Artificial Sequence
  Description of Artificial Sequence: Synthetic oligonucleotide
  Target: COL7A1; (+) strand; PAM type: YTN; PAM sequence: TTA
gagaggccaggccaggccag

SEQ ID NO: 29315 - DNA, 20 bp, Artificial Sequence
  Description of Artificial Sequence: Synthetic oligonucleotide
  Target: COL7A1; (+) strand; PAM type: YTN; PAM sequence: CTA
gaagaaaaagacagacagaa

SEQ ID NO: 29316 - DNA, 20 bp, Artificial Sequence
  Description of Artificial Sequence: Synthetic oligonucleotide
  Target: COL7A1; (+) strand; PAM type: YTN; PAM sequence: TTC
agacagaaacacagagtcca

SEQ ID NO: 29317 - DNA, 20 bp, Artificial Sequence
  Description of Artificial Sequence: Synthetic oligonucleotide
  Target: COL7A1; (+) strand; PAM type: YTN; PAM sequence: TTC
tcagcaggagagcttgcagc

SEQ ID NO: 29318 - DNA, 20 bp, Artificial Sequence
  Description of Artificial Sequence: Synthetic oligonucleotide
  Target: COL7A1; (+) strand; PAM type: YTN; PAM sequence: CTC
agcaggagagcttgcagctg

SEQ ID NO: 29319 - DNA, 20 bp, Artificial Sequence
  Description of Artificial Sequence: Synthetic oligonucleotide
  Target: COL7A1; (+) strand; PAM type: YTN; PAM sequence: CTT
gcagctgatccaggaaacag

SEQ ID NO: 29320 - DNA, 20 bp, Artificial Sequence
  Description of Artificial Sequence: Synthetic oligonucleotide
  Target: COL7A1; (+) strand; PAM type: YTN; PAM sequence: TTG
cagctgatccaggaaacaga

SEQ ID NO: 29321 - DNA, 20 bp, Artificial Sequence
  Description of Artificial Sequence: Synthetic oligonucleotide
  Target: COL7A1; (+) strand; PAM type: YTN; PAM sequence: CTG
atccaggaaacagaagggca

SEQ ID NO: 29322 - DNA, 20 bp, Artificial Sequence
  Description of Artificial Sequence: Synthetic oligonucleotide
  Target: COL7A1; (+) strand; PAM type: YTN; PAM sequence: CTC
agaggcagaaaagcagccag

SEQ ID NO: 29323 - DNA, 20 bp, Artificial Sequence
  Description of Artificial Sequence: Synthetic oligonucleotide
  Target: COL7A1; (+) strand; PAM type: YTN; PAM sequence: CTG
ggtccaagccctccataaag

SEQ ID NO: 29324 - DNA, 20 bp, Artificial Sequence
  Description of Artificial Sequence: Synthetic oligonucleotide
  Target: COL7A1; (+) strand; PAM type: YTN; PAM sequence: CTC
cataaagccaaaccccacat

SEQ ID NO: 29325 - DNA, 20 bp, Artificial Sequence
  Description of Artificial Sequence: Synthetic oligonucleotide
  Target: COL7A1; (+) strand; PAM type: YTN; PAM sequence: CTC
aacctccaagacccttccca

SEQ ID NO: 29326 - DNA, 20 bp, Artificial Sequence
  Description of Artificial Sequence: Synthetic oligonucleotide
  Target: COL7A1; (+) strand; PAM type: YTN; PAM sequence: CTC
caagacccttcccatcccga

SEQ ID NO: 29327 - DNA, 20 bp, Artificial Sequence
  Description of Artificial Sequence: Synthetic oligonucleotide
  Target: COL7A1; (+) strand; PAM type: YTN; PAM sequence: CTT
cccatcccgacccaacccag

SEQ ID NO: 29328 - DNA, 20 bp, Artificial Sequence
  Description of Artificial Sequence: Synthetic oligonucleotide
  Target: COL7A1; (+) strand; PAM type: YTN; PAM sequence: TTC
ccatcccgacccaacccagt

SEQ ID NO: 29329 - DNA, 20 bp, Artificial Sequence
  Description of Artificial Sequence: Synthetic oligonucleotide
  Target: COL7A1; (+) strand; PAM type: YTN; PAM sequence: CTA
ccgccaccagctgcttctgg

SEQ ID NO: 29330 - DNA, 20 bp, Artificial Sequence
  Description of Artificial Sequence: Synthetic oligonucleotide
  Target: COL7A1; (+) strand; PAM type: YTN; PAM sequence: CTG
cttctggggtaaggcagcct

SEQ ID NO: 29331 - DNA, 20 bp, Artificial Sequence
  Description of Artificial Sequence: Synthetic oligonucleotide
  Target: COL7A1; (+) strand; PAM type: YTN; PAM sequence: CTT
ctggggtaaggcagcctgct

SEQ ID NO: 29332 - DNA, 20 bp, Artificial Sequence
  Description of Artificial Sequence: Synthetic oligonucleotide
  Target: COL7A1; (+) strand; PAM type: YTN; PAM sequence: TTC
tggggtaaggcagcctgctg

SEQ ID NO: 29333 - DNA, 20 bp, Artificial Sequence
  Description of Artificial Sequence: Synthetic oligonucleotide
  Target: COL7A1; (+) strand; PAM type: YTN; PAM sequence: CTG
gggtaaggcagcctgctgtg

SEQ ID NO: 29334 - DNA, 20 bp, Artificial Sequence
  Description of Artificial Sequence: Synthetic oligonucleotide
  Target: COL7A1; (+) strand; PAM type: YTN; PAM sequence: CTG
ctgtggctgcctggggctgg

SEQ ID NO: 29335 - DNA, 20 bp, Artificial Sequence
  Description of Artificial Sequence: Synthetic oligonucleotide
  Target: COL7A1; (+) strand; PAM type: YTN; PAM sequence: CTG
tggctgcctggggctggggc

SEQ ID NO: 29336 - DNA, 20 bp, Artificial Sequence
  Description of Artificial Sequence: Synthetic oligonucleotide
  Target: COL7A1; (+) strand; PAM type: YTN; PAM sequence: CTG
cctggggctggggccaggca

SEQ ID NO: 29337 - DNA, 20 bp, Artificial Sequence
  Description of Artificial Sequence: Synthetic oligonucleotide
  Target: COL7A1; (+) strand; PAM type: YTN; PAM sequence: CTG
gggctggggccaggcactac

SEQ ID NO: 29338 - DNA, 20 bp, Artificial Sequence
  Description of Artificial Sequence: Synthetic oligonucleotide
  Target: COL7A1; (+) strand; PAM type: YTN; PAM sequence: CTG
gggccaggcactactgtcct

SEQ ID NO: 29339 - DNA, 20 bp, Artificial Sequence
  Description of Artificial Sequence: Synthetic oligonucleotide
  Target: COL7A1; (+) strand; PAM type: YTN; PAM sequence: CTA
ctgtcctgtggtctgaccct

SEQ ID NO: 29340 - DNA, 20 bp, Artificial Sequence
  Description of Artificial Sequence: Synthetic oligonucleotide
  Target: COL7A1; (+) strand; PAM type: YTN; PAM sequence: CTG
tcctgtggtctgaccctcta

SEQ ID NO: 29341 - DNA, 20 bp, Artificial Sequence
  Description of Artificial Sequence: Synthetic oligonucleotide
  Target: COL7A1; (+) strand; PAM type: YTN; PAM sequence: CTG
tggtctgaccctctaccccg

SEQ ID NO: 29342 - DNA, 20 bp, Artificial Sequence
  Description of Artificial Sequence: Synthetic oligonucleotide
  Target: COL7A1; (+) strand; PAM type: YTN; PAM sequence: CTG
accctctaccccgcttcagg

SEQ ID NO: 29343 - DNA, 20 bp, Artificial Sequence
  Description of Artificial Sequence: Synthetic oligonucleotide
  Target: COL7A1; (+) strand; PAM type: YTN; PAM sequence: CTC
taccccgcttcagggcccat

SEQ ID NO: 29344 - DNA, 20 bp, Artificial Sequence
  Description of Artificial Sequence: Synthetic oligonucleotide
  Target: COL7A1; (+) strand; PAM type: YTN; PAM sequence: CTA
ccccgcttcagggcccattt

SEQ ID NO: 29345 - DNA, 20 bp, Artificial Sequence
  Description of Artificial Sequence: Synthetic oligonucleotide
  Target: COL7A1; (+) strand; PAM type: YTN; PAM sequence: CTT
cagggcccatttatctccct

SEQ ID NO: 29346 - DNA, 20 bp, Artificial Sequence
  Description of Artificial Sequence: Synthetic oligonucleotide
  Target: COL7A1; (+) strand; PAM type: YTN; PAM sequence: TTC
agggcccatttatctccctc

SEQ ID NO: 29347 - DNA, 20 bp, Artificial Sequence
  Description of Artificial Sequence: Synthetic oligonucleotide
  Target: COL7A1; (+) strand; PAM type: YTN; PAM sequence: TTT
atctccctcagccccctggg

SEQ ID NO: 29348 - DNA, 20 bp, Artificial Sequence
  Description of Artificial Sequence: Synthetic oligonucleotide
  Target: COL7A1; (+) strand; PAM type: YTN; PAM sequence: TTA
tctccctcagccccctgggg

SEQ ID NO: 29349 - DNA, 20 bp, Artificial Sequence
  Description of Artificial Sequence: Synthetic oligonucleotide
  Target: COL7A1; (+) strand; PAM type: YTN; PAM sequence: CTC
cctcagccccctggggtggg

SEQ ID NO: 29350 - DNA, 20 bp, Artificial Sequence
  Description of Artificial Sequence: Synthetic oligonucleotide
  Target: COL7A1; (+) strand; PAM type: YTN; PAM sequence: CTC
agccccctggggtgggagct

SEQ ID NO: 29351 - DNA, 20 bp, Artificial Sequence
  Description of Artificial Sequence: Synthetic oligonucleotide
  Target: COL7A1; (+) strand; PAM type: YTN; PAM sequence: CTG
gggtgggagctggtacatgc

SEQ ID NO: 29352 - DNA, 20 bp, Artificial Sequence
  Description of Artificial Sequence: Synthetic oligonucleotide
  Target: COL7A1; (+) strand; PAM type: YTN; PAM sequence: CTG
gtacatgcttcctggcatga

SEQ ID NO: 29353 - DNA, 20 bp, Artificial Sequence
  Description of Artificial Sequence: Synthetic oligonucleotide
  Target: COL7A1; (+) strand; PAM type: YTN; PAM sequence: CTT
cctggcatgaggcagccccc

SEQ ID NO: 29354 - DNA, 20 bp, Artificial Sequence
  Description of Artificial Sequence: Synthetic oligonucleotide
  Target: COL7A1; (+) strand; PAM type: YTN; PAM sequence: TTC
ctggcatgaggcagcccccc

SEQ ID NO: 29355 - DNA, 20 bp, Artificial Sequence
  Description of Artificial Sequence: Synthetic oligonucleotide
  Target: COL7A1; (+) strand; PAM type: YTN; PAM sequence: CTG
gcatgaggcagccccccacc

SEQ ID NO: 29356 - DNA, 20 bp, Artificial Sequence
  Description of Artificial Sequence: Synthetic oligonucleotide
  Target: COL7A1; (+) strand; PAM type: YTN; PAM sequence: CTA
tgactcatccctcccggggg

SEQ ID NO: 29357 - DNA, 20 bp, Artificial Sequence
  Description of Artificial Sequence: Synthetic oligonucleotide
  Target: COL7A1; (+) strand; PAM type: YTN; PAM sequence: CTC
atccctcccgggggtgtcct

SEQ ID NO: 29358 - DNA, 20 bp, Artificial Sequence
  Description of Artificial Sequence: Synthetic oligonucleotide
  Target: COL7A1; (+) strand; PAM type: YTN; PAM sequence: CTC
ccgggggtgtccttagcccc

SEQ ID NO: 29359 - DNA, 20 bp, Artificial Sequence
  Description of Artificial Sequence: Synthetic oligonucleotide
  Target: COL7A1; (+) strand; PAM type: YTN; PAM sequence: CTT
agcccccaccctatctactc

SEQ ID NO: 29360 - DNA, 20 bp, Artificial Sequence
  Description of Artificial Sequence: Synthetic oligonucleotide
  Target: COL7A1; (+) strand; PAM type: YTN; PAM sequence: TTA
gcccccaccctatctactct

SEQ ID NO: 29361 - DNA, 20 bp, Artificial Sequence
  Description of Artificial Sequence: Synthetic oligonucleotide
  Target: COL7A1; (+) strand; PAM type: YTN; PAM sequence: CTA
tctactcttttccggggaca

SEQ ID NO: 29362 - DNA, 20 bp, Artificial Sequence
  Description of Artificial Sequence: Synthetic oligonucleotide
  Target: COL7A1; (+) strand; PAM type: YTN; PAM sequence: CTA
ctcttttccggggacaagtt

SEQ ID NO: 29363 - DNA, 20 bp, Artificial Sequence
  Description of Artificial Sequence: Synthetic oligonucleotide
  Target: COL7A1; (+) strand; PAM type: YTN; PAM sequence: CTC
ttttccggggacaagttggg

SEQ ID NO: 29364 - DNA, 20 bp, Artificial Sequence
  Description of Artificial Sequence: Synthetic oligonucleotide
  Target: COL7A1; (+) strand; PAM type: YTN; PAM sequence: CTT
ttccggggacaagttgggga

SEQ ID NO: 29365 - DNA, 20 bp, Artificial Sequence
  Description of Artificial Sequence: Synthetic oligonucleotide
  Target: COL7A1; (+) strand; PAM type: YTN; PAM sequence: TTT
tccggggacaagttggggac

SEQ ID NO: 29366 - DNA, 20 bp, Artificial Sequence
  Description of Artificial Sequence: Synthetic oligonucleotide
  Target: COL7A1; (+) strand; PAM type: YTN; PAM sequence: TTT
ccggggacaagttggggact

SEQ ID NO: 29367 - DNA, 20 bp, Artificial Sequence
  Description of Artificial Sequence: Synthetic oligonucleotide
  Target: COL7A1; (+) strand; PAM type: YTN; PAM sequence: TTC
cggggacaagttggggactg

SEQ ID NO: 29368 - DNA, 20 bp, Artificial Sequence
  Description of Artificial Sequence: Synthetic oligonucleotide
  Target: COL7A1; (+) strand; PAM type: YTN; PAM sequence: TTG
gggactgagaatcacaagac

SEQ ID NO: 29369 - DNA, 20 bp, Artificial Sequence
  Description of Artificial Sequence: Synthetic oligonucleotide
  Target: COL7A1; (+) strand; PAM type: YTN; PAM sequence: CTG
agaatcacaagacagtgacc

SEQ ID NO: 29370 - DNA, 20 bp, Artificial Sequence
  Description of Artificial Sequence: Synthetic oligonucleotide
  Target: COL7A1; (+) strand; PAM type: YTN; PAM sequence: CTG
ggcagagggactctgtaccc

SEQ ID NO: 29371 - DNA, 20 bp, Artificial Sequence
  Description of Artificial Sequence: Synthetic oligonucleotide
  Target: COL7A1; (+) strand; PAM type: YTN; PAM sequence: CTC
tgtacccatgcagaataata

SEQ ID NO: 29372 - DNA, 20 bp, Artificial Sequence
  Description of Artificial Sequence: Synthetic oligonucleotide
  Target: COL7A1; (+) strand; PAM type: YTN; PAM sequence: CTG
tacccatgcagaataatacc

SEQ ID NO: 29373 - DNA, 20 bp, Artificial Sequence
  Description of Artificial Sequence: Synthetic oligonucleotide
  Target: COL7A1; (+) strand; PAM type: YTN; PAM sequence: CTT
cccccttgaaaccccccatc

SEQ ID NO: 29374 - DNA, 20 bp, Artificial Sequence
  Description of Artificial Sequence: Synthetic oligonucleotide
  Target: COL7A1; (+) strand; PAM type: YTN; PAM sequence: TTC
ccccttgaaaccccccatct

SEQ ID NO: 29375 - DNA, 20 bp, Artificial Sequence
  Description of Artificial Sequence: Synthetic oligonucleotide
  Target: COL7A1; (+) strand; PAM type: YTN; PAM sequence: CTT
gaaaccccccatcttcccaa

SEQ ID NO: 29376 - DNA, 20 bp, Artificial Sequence
  Description of Artificial Sequence: Synthetic oligonucleotide
  Target: COL7A1; (+) strand; PAM type: YTN; PAM sequence: TTG
aaaccccccatcttcccaaa

SEQ ID NO: 29377 - DNA, 20 bp, Artificial Sequence
  Description of Artificial Sequence: Synthetic oligonucleotide
  Target: COL7A1; (+) strand; PAM type: YTN; PAM sequence: CTT
cccaaacagtcacaacagga

SEQ ID NO: 29378 - DNA, 20 bp, Artificial Sequence
  Description of Artificial Sequence: Synthetic oligonucleotide
  Target: COL7A1; (+) strand; PAM type: YTN; PAM sequence: TTC
ccaaacagtcacaacaggag

SEQ ID NO: 29379 - DNA, 20 bp, Artificial Sequence
  Description of Artificial Sequence: Synthetic oligonucleotide
  Target: COL7A1; (+) strand; PAM type: YTN; PAM sequence: CTT
ttaaaacagcagctttaatg

SEQ ID NO: 29380 - DNA, 20 bp, Artificial Sequence
  Description of Artificial Sequence: Synthetic oligonucleotide
  Target: COL7A1; (+) strand; PAM type: YTN; PAM sequence: TTT
taaaacagcagctttaatgc

SEQ ID NO: 29381 - DNA, 20 bp, Artificial Sequence
  Description of Artificial Sequence: Synthetic oligonucleotide
  Target: COL7A1; (+) strand; PAM type: YTN; PAM sequence: TTT
aaaacagcagctttaatgcc

SEQ ID NO: 29382 - DNA, 20 bp, Artificial Sequence
  Description of Artificial Sequence: Synthetic oligonucleotide
  Target: COL7A1; (+) strand; PAM type: YTN; PAM sequence: TTA
aaacagcagctttaatgccc

SEQ ID NO: 29383 - DNA, 20 bp, Artificial Sequence
  Description of Artificial Sequence: Synthetic oligonucleotide
  Target: COL7A1; (+) strand; PAM type: YTN; PAM sequence: CTT
taatgccccccagaatcagc

SEQ ID NO: 29384 - DNA, 20 bp, Artificial Sequence
  Description of Artificial Sequence: Synthetic oligonucleotide
  Target: COL7A1; (+) strand; PAM type: YTN; PAM sequence: TTT
aatgccccccagaatcagca

SEQ ID NO: 29385 - DNA, 20 bp, Artificial Sequence
  Description of Artificial Sequence: Synthetic oligonucleotide
  Target: COL7A1; (+) strand; PAM type: YTN; PAM sequence: TTA
atgccccccagaatcagcac

SEQ ID NO: 29386 - DNA, 20 bp, Artificial Sequence
  Description of Artificial Sequence: Synthetic oligonucleotide
  Target: COL7A1; (+) strand; PAM type: YTN; PAM sequence: CTT
gggtcaaggggcgggtcaga

SEQ ID NO: 29387 - DNA, 20 bp, Artificial Sequence
  Description of Artificial Sequence: Synthetic oligonucleotide
  Target: COL7A1; (+) strand; PAM type: YTN; PAM sequence: TTG
ggtcaaggggcgggtcagac

SEQ ID NO: 29388 - DNA, 20 bp, Artificial Sequence
  Description of Artificial Sequence: Synthetic oligonucleotide
  Target: COL7A1; (+) strand; PAM type: YTN; PAM sequence: CTC
actgcccacagccacccccc

SEQ ID NO: 29389 - DNA, 20 bp, Artificial Sequence
  Description of Artificial Sequence: Synthetic oligonucleotide
  Target: COL7A1; (+) strand; PAM type: YTN; PAM sequence: CTG
cccacagccacccccccaca

SEQ ID NO: 29390 - DNA, 20 bp, Artificial Sequence
  Description of Artificial Sequence: Synthetic oligonucleotide
  Target: COL7A1; (+) strand; PAM type: YTN; PAM sequence: CTG
ccagggtggcaggagccaca

SEQ ID NO: 29391 - DNA, 20 bp, Artificial Sequence
  Description of Artificial Sequence: Synthetic oligonucleotide
  Target: COL7A1; (+) strand; PAM type: YTN; PAM sequence: TTT
gtccacaggggggaaggcta

SEQ ID NO: 29392 - DNA, 20 bp, Artificial Sequence
  Description of Artificial Sequence: Synthetic oligonucleotide
  Target: COL7A1; (+) strand; PAM type: YTN; PAM sequence: TTG
tccacaggggggaaggctag

SEQ ID NO: 29393 - DNA, 20 bp, Artificial Sequence
  Description of Artificial Sequence: Synthetic oligonucleotide
  Target: COL7A1; (+) strand; PAM type: YTN; PAM sequence: CTA
gacccacgggaccaagtcac

SEQ ID NO: 29394 - DNA, 20 bp, Artificial Sequence
  Description of Artificial Sequence: Synthetic oligonucleotide
  Target: COL7A1; (+) strand; PAM type: YTN; PAM sequence: CTG
aaataacggacgtgcacacg

SEQ ID NO: 29395 - DNA, 20 bp, Artificial Sequence
  Description of Artificial Sequence: Synthetic oligonucleotide
  Target: COL7A1; (+) strand; PAM type: YTN; PAM sequence: CTC
acgtgcacacaagcctctag

SEQ ID NO: 29396 - DNA, 20 bp, Artificial Sequence
  Description of Artificial Sequence: Synthetic oligonucleotide
  Target: COL7A1; (+) strand; PAM type: YTN; PAM sequence: CTC
tagcaccaaggggagggaca

SEQ ID NO: 29397 - DNA, 20 bp, Artificial Sequence
  Description of Artificial Sequence: Synthetic oligonucleotide
  Target: COL7A1; (+) strand; PAM type: YTN; PAM sequence: CTA
gcaccaaggggagggacagt

SEQ ID NO: 29398 - DNA, 20 bp, Artificial Sequence
  Description of Artificial Sequence: Synthetic oligonucleotide
  Target: COL7A1; (+) strand; PAM type: YTN; PAM sequence: TTC
tgctgagaccccgactcctc

SEQ ID NO: 29399 - DNA, 20 bp, Artificial Sequence
  Description of Artificial Sequence: Synthetic oligonucleotide
  Target: COL7A1; (+) strand; PAM type: YTN; PAM sequence: CTG
ctgagaccccgactcctcca

SEQ ID NO: 29400 - DNA, 20 bp, Artificial Sequence
  Description of Artificial Sequence: Synthetic oligonucleotide
  Target: COL7A1; (+) strand; PAM type: YTN; PAM sequence: CTG
agaccccgactcctccaggg

SEQ ID NO: 29401 - DNA, 20 bp, Artificial Sequence
  Description of Artificial Sequence: Synthetic oligonucleotide
  Target: COL7A1; (+) strand; PAM type: YTN; PAM sequence: CTC
ctccaggggatgctgaatct

SEQ ID NO: 29402 - DNA, 20 bp, Artificial Sequence
  Description of Artificial Sequence: Synthetic oligonucleotide
  Target: COL7A1; (+) strand; PAM type: YTN; PAM sequence: CTC
caggggatgctgaatctcag

SEQ ID NO: 29403 - DNA, 20 bp, Artificial Sequence
  Description of Artificial Sequence: Synthetic oligonucleotide
  Target: COL7A1; (+) strand; PAM type: YTN; PAM sequence: CTG
aatctcagctcattatctgg

SEQ ID NO: 29404 - DNA, 20 bp, Artificial Sequence
  Description of Artificial Sequence: Synthetic oligonucleotide
  Target: COL7A1; (+) strand; PAM type: YTN; PAM sequence: CTC
agctcattatctgggcctca

SEQ ID NO: 29405 - DNA, 20 bp, Artificial Sequence
  Description of Artificial Sequence: Synthetic oligonucleotide
  Target: COL7A1; (+) strand; PAM type: YTN; PAM sequence: CTC
attatctgggcctcagtcct

SEQ ID NO: 29406 - DNA, 20 bp, Artificial Sequence
  Description of Artificial Sequence: Synthetic oligonucleotide
  Target: COL7A1; (+) strand; PAM type: YTN; PAM sequence: TTA
tctgggcctcagtcctgggc

SEQ ID NO: 29407 - DNA, 20 bp, Artificial Sequence
  Description of Artificial Sequence: Synthetic oligonucleotide
  Target: COL7A1; (+) strand; PAM type: YTN; PAM sequence: CTG
ggcctcagtcctgggcagta

SEQ ID NO: 29408 - DNA, 20 bp, Artificial Sequence
  Description of Artificial Sequence: Synthetic oligonucleotide
  Target: COL7A1; (+) strand; PAM type: YTN; PAM sequence: CTC
agtcctgggcagtacctggt

SEQ ID NO: 29409 - DNA, 20 bp, Artificial Sequence
  Description of Artificial Sequence: Synthetic oligonucleotide
  Target: COL7A1; (+) strand; PAM type: YTN; PAM sequence: CTG
ggcagtacctggtgaggaca

SEQ ID NO: 29410 - DNA, 20 bp, Artificial Sequence
  Description of Artificial Sequence: Synthetic oligonucleotide
  Target: COL7A1; (+) strand; PAM type: YTN; PAM sequence: CTG
gtgaggacaggttggaaacg

SEQ ID NO: 29411 - DNA, 20 bp, Artificial Sequence
  Description of Artificial Sequence: Synthetic oligonucleotide
  Target: COL7A1; (+) strand; PAM type: YTN; PAM sequence: TTG
gaaacggtcgtcagccatct

SEQ ID NO: 29412 - DNA, 20 bp, Artificial Sequence
  Description of Artificial Sequence: Synthetic oligonucleotide
  Target: COL7A1; (+) strand; PAM type: YTN; PAM sequence: CTG
accttccccggagacgctca

SEQ ID NO: 29413 - DNA, 20 bp, Artificial Sequence
  Description of Artificial Sequence: Synthetic oligonucleotide
  Target: COL7A1; (+) strand; PAM type: YTN; PAM sequence: CTT
ccccggagacgctcaggcag

SEQ ID NO: 29414 - DNA, 20 bp, Artificial Sequence
  Description of Artificial Sequence: Synthetic oligonucleotide
  Target: COL7A1; (+) strand; PAM type: YTN; PAM sequence: TTC
cccggagacgctcaggcaga

SEQ ID NO: 29415 - DNA, 20 bp, Artificial Sequence
  Description of Artificial Sequence: Synthetic oligonucleotide
  Target: COL7A1; (+) strand; PAM type: YTN; PAM sequence: CTC
aggcagaggcaccgccaagg

SEQ ID NO: 29416 - DNA, 20 bp, Artificial Sequence
  Description of Artificial Sequence: Synthetic oligonucleotide
  Target: COL7A1; (+) strand; PAM type: YTN; PAM sequence: CTA
caacaggaagtgggggctct

SEQ ID NO: 29417 - DNA, 20 bp, Artificial Sequence
  Description of Artificial Sequence: Synthetic oligonucleotide
  Target: COL7A1; (+) strand; PAM type: YTN; PAM sequence: CTC
tgacctcagaggggtccata

SEQ ID NO: 29418 - DNA, 20 bp, Artificial Sequence
  Description of Artificial Sequence: Synthetic oligonucleotide
  Target: COL7A1; (+) strand; PAM type: YTN; PAM sequence: CTG
acctcagaggggtccatact

SEQ ID NO: 29419 - DNA, 20 bp, Artificial Sequence
  Description of Artificial Sequence: Synthetic oligonucleotide
  Target: COL7A1; (+) strand; PAM type: YTN; PAM sequence: CTC
agaggggtccatacttaggt

SEQ ID NO: 29420 - DNA, 20 bp, Artificial Sequence
  Description of Artificial Sequence: Synthetic oligonucleotide
  Target: COL7A1; (+) strand; PAM type: YTN; PAM sequence: CTT
aggtctttaaaggagggaac

SEQ ID NO: 29421 - DNA, 20 bp, Artificial Sequence
  Description of Artificial Sequence: Synthetic oligonucleotide
  Target: COL7A1; (+) strand; PAM type: YTN; PAM sequence: TTA
ggtctttaaaggagggaaca

SEQ ID NO: 29422 - DNA, 20 bp, Artificial Sequence
  Description of Artificial Sequence: Synthetic oligonucleotide
  Target: COL7A1; (+) strand; PAM type: YTN; PAM sequence: CTT
taaaggagggaacatggaag

SEQ ID NO: 29423 - DNA, 20 bp, Artificial Sequence
  Description of Artificial Sequence: Synthetic oligonucleotide
  Target: COL7A1; (+) strand; PAM type: YTN; PAM sequence: TTT
aaaggagggaacatggaagg

SEQ ID NO: 29424 - DNA, 20 bp, Artificial Sequence
  Description of Artificial Sequence: Synthetic oligonucleotide
  Target: COL7A1; (+) strand; PAM type: YTN; PAM sequence: TTA
aaggagggaacatggaaggg

SEQ ID NO: 29425 - DNA, 20 bp, Artificial Sequence
  Description of Artificial Sequence: Synthetic oligonucleotide
  Target: COL7A1; (+) strand; PAM type: YTN; PAM sequence: CTA
ctgggggctccacggctggg

SEQ ID NO: 29426 - DNA, 20 bp, Artificial Sequence
  Description of Artificial Sequence: Synthetic oligonucleotide
  Target: COL7A1; (+) strand; PAM type: YTN; PAM sequence: CTG
ggggctccacggctggggct

SEQ ID NO: 29427 - DNA, 20 bp, Artificial Sequence
  Description of Artificial Sequence: Synthetic oligonucleotide
  Target: COL7A1; (+) strand; PAM type: YTN; PAM sequence: CTC
cacggctggggctctatatt

SEQ ID NO: 29428 - DNA, 20 bp, Artificial Sequence
  Description of Artificial Sequence: Synthetic oligonucleotide
  Target: COL7A1; (+) strand; PAM type: YTN; PAM sequence: CTG
gggctctatattcagctctt

SEQ ID NO: 29429 - DNA, 20 bp, Artificial Sequence
  Description of Artificial Sequence: Synthetic oligonucleotide
  Target: COL7A1; (+) strand; PAM type: YTN; PAM sequence: CTC
tatattcagctctttggtct

SEQ ID NO: 29430 - DNA, 20 bp, Artificial Sequence
  Description of Artificial Sequence: Synthetic oligonucleotide
  Target: COL7A1; (+) strand; PAM type: YTN; PAM sequence: CTA
tattcagctctttggtctgg

SEQ ID NO: 29431 - DNA, 20 bp, Artificial Sequence
  Description of Artificial Sequence: Synthetic oligonucleotide
  Target: COL7A1; (+) strand; PAM type: YTN; PAM sequence: TTC
agctctttggtctgggcgtc

SEQ ID NO: 29432 - DNA, 20 bp, Artificial Sequence
  Description of Artificial Sequence: Synthetic oligonucleotide
  Target: COL7A1; (+) strand; PAM type: YTN; PAM sequence: CTC
tttggtctgggcgtctgccc

SEQ ID NO: 29433 - DNA, 20 bp, Artificial Sequence
  Description of Artificial Sequence: Synthetic oligonucleotide
  Target: COL7A1; (+) strand; PAM type: YTN; PAM sequence: CTT
tggtctgggcgtctgcccca

SEQ ID NO: 29434 - DNA, 20 bp, Artificial Sequence
  Description of Artificial Sequence: Synthetic oligonucleotide
  Target: COL7A1; (+) strand; PAM type: YTN; PAM sequence: TTT
ggtctgggcgtctgccccag

SEQ ID NO: 29435 - DNA, 20 bp, Artificial Sequence
  Description of Artificial Sequence: Synthetic oligonucleotide
  Target: COL7A1; (+) strand; PAM type: YTN; PAM sequence: TTG
gtctgggcgtctgccccagg

SEQ ID NO: 29436 - DNA, 20 bp, Artificial Sequence
  Description of Artificial Sequence: Synthetic oligonucleotide
  Target: COL7A1; (+) strand; PAM type: YTN; PAM sequence: CTG
ggcgtctgccccaggtcccc

SEQ ID NO: 29437 - DNA, 20 bp, Artificial Sequence
  Description of Artificial Sequence: Synthetic oligonucleotide
  Target: COL7A1; (+) strand; PAM type: YTN; PAM sequence: CTG
ccccaggtcccctactgcga

SEQ ID NO: 29438 - DNA, 20 bp, Artificial Sequence
  Description of Artificial Sequence: Synthetic oligonucleotide
  Target: COL7A1; (+) strand; PAM type: YTN; PAM sequence: CTA
ctgcgagggagcgtctcctc

SEQ ID NO: 29439 - DNA, 20 bp, Artificial Sequence
  Description of Artificial Sequence: Synthetic oligonucleotide
  Target: COL7A1; (+) strand; PAM type: YTN; PAM sequence: CTG
cgagggagcgtctcctccag

SEQ ID NO: 29440 - DNA, 20 bp, Artificial Sequence
  Description of Artificial Sequence: Synthetic oligonucleotide
  Target: COL7A1; (+) strand; PAM type: YTN; PAM sequence: CTC
ctccaggaccctgacctgga

SEQ ID NO: 29441 - DNA, 20 bp, Artificial Sequence
  Description of Artificial Sequence: Synthetic oligonucleotide
  Target: COL7A1; (+) strand; PAM type: YTN; PAM sequence: CTC
caggaccctgacctggaacc

SEQ ID NO: 29442 - DNA, 20 bp, Artificial Sequence
  Description of Artificial Sequence: Synthetic oligonucleotide
  Target: COL7A1; (+) strand; PAM type: YTN; PAM sequence: CTG
acctggaaccctggcccaag

SEQ ID NO: 29443 - DNA, 20 bp, Artificial Sequence
  Description of Artificial Sequence: Synthetic oligonucleotide
  Target: COL7A1; (+) strand; PAM type: YTN; PAM sequence: CTG
gaaccctggcccaaggactc

SEQ ID NO: 29444 - DNA, 20 bp, Artificial Sequence
  Description of Artificial Sequence: Synthetic oligonucleotide
  Target: COL7A1; (+) strand; PAM type: YTN; PAM sequence: CTG
gcccaaggactcctccccca

SEQ ID NO: 29445 - DNA, 20 bp, Artificial Sequence
  Description of Artificial Sequence: Synthetic oligonucleotide
  Target: COL7A1; (+) strand; PAM type: YTN; PAM sequence: CTC
ctcccccagaacccgatcca

SEQ ID NO: 29446 - DNA, 20 bp, Artificial Sequence
  Description of Artificial Sequence: Synthetic oligonucleotide
  Target: COL7A1; (+) strand; PAM type: YTN; PAM sequence: CTC
ccccagaacccgatccaggc

SEQ ID NO: 29447 - DNA, 20 bp, Artificial Sequence
  Description of Artificial Sequence: Synthetic oligonucleotide
  Target: COL7A1; (+) strand; PAM type: YTN; PAM sequence: CTC
agtgcccagttccccacggt

SEQ ID NO: 29448 - DNA, 20 bp, Artificial Sequence
  Description of Artificial Sequence: Synthetic oligonucleotide
  Target: COL7A1; (+) strand; PAM type: YTN; PAM sequence: TTC
cccacggtgggggctcagcc

SEQ ID NO: 29449 - DNA, 20 bp, Artificial Sequence
  Description of Artificial Sequence: Synthetic oligonucleotide
  Target: COL7A1; (+) strand; PAM type: YTN; PAM sequence: CTC
agcccatacctgtcccctgg

SEQ ID NO: 29450 - DNA, 20 bp, Artificial Sequence
  Description of Artificial Sequence: Synthetic oligonucleotide
  Target: COL7A1; (+) strand; PAM type: YTN; PAM sequence: CTG
tcccctggctctggaccacc

SEQ ID NO: 29451 - DNA, 20 bp, Artificial Sequence
  Description of Artificial Sequence: Synthetic oligonucleotide
  Target: COL7A1; (+) strand; PAM type: YTN; PAM sequence: CTG
gctctggaccacccggggtg

SEQ ID NO: 29452 - DNA, 20 bp, Artificial Sequence
  Description of Artificial Sequence: Synthetic oligonucleotide
  Target: COL7A1; (+) strand; PAM type: YTN; PAM sequence: CTC
tggaccacccggggtgggca

SEQ ID NO: 29453 - DNA, 20 bp, Artificial Sequence
  Description of Artificial Sequence: Synthetic oligonucleotide
  Target: COL7A1; (+) strand; PAM type: YTN; PAM sequence: CTG
gaccacccggggtgggcagc

SEQ ID NO: 29454 - DNA, 20 bp, Artificial Sequence
  Description of Artificial Sequence: Synthetic oligonucleotide
  Target: COL7A1; (+) strand; PAM type: YTN; PAM sequence: CTC
gcaggcctcacgggtcccaa

SEQ ID NO: 29455 - DNA, 20 bp, Artificial Sequence
  Description of Artificial Sequence: Synthetic oligonucleotide
  Target: COL7A1; (+) strand; PAM type: YTN; PAM sequence: CTC
acgggtcccaaaacggttgg

SEQ ID NO: 29456 - DNA, 20 bp, Artificial Sequence
  Description of Artificial Sequence: Synthetic oligonucleotide
  Target: COL7A1; (+) strand; PAM type: YTN; PAM sequence: TTG
gcattccctccacagccacc

SEQ ID NO: 29457 - DNA, 20 bp, Artificial Sequence
  Description of Artificial Sequence: Synthetic oligonucleotide
  Target: COL7A1; (+) strand; PAM type: YTN; PAM sequence: TTC
cctccacagccaccatagac

SEQ ID NO: 29458 - DNA, 20 bp, Artificial Sequence
  Description of Artificial Sequence: Synthetic oligonucleotide
  Target: COL7A1; (+) strand; PAM type: YTN; PAM sequence: CTC
cacagccaccatagacaaaa

SEQ ID NO: 29459 - DNA, 20 bp, Artificial Sequence
  Description of Artificial Sequence: Synthetic oligonucleotide
  Target: COL7A1; (+) strand; PAM type: YTN; PAM sequence: CTC
tgtgctgcctgtcacagccc

SEQ ID NO: 29460 - DNA, 20 bp, Artificial Sequence
  Description of Artificial Sequence: Synthetic oligonucleotide
  Target: COL7A1; (+) strand; PAM type: YTN; PAM sequence: CTG
tgctgcctgtcacagcccga

SEQ ID NO: 29461 - DNA, 20 bp, Artificial Sequence
  Description of Artificial Sequence: Synthetic oligonucleotide
  Target: COL7A1; (+) strand; PAM type: YTN; PAM sequence: CTG
cctgtcacagcccgatggta

SEQ ID NO: 29462 - DNA, 20 bp, Artificial Sequence
  Description of Artificial Sequence: Synthetic oligonucleotide
  Target: COL7A1; (+) strand; PAM type: YTN; PAM sequence: CTG
tcacagcccgatggtaccag

SEQ ID NO: 29463 - DNA, 20 bp, Artificial Sequence
  Description of Artificial Sequence: Synthetic oligonucleotide
  Target: COL7A1; (+) strand; PAM type: YTN; PAM sequence: CTC
atccagtggcagggaacagg

SEQ ID NO: 29464 - DNA, 20 bp, Artificial Sequence
  Description of Artificial Sequence: Synthetic oligonucleotide
  Target: COL7A1; (+) strand; PAM type: YTN; PAM sequence: CTG
ggccaatggggtcaagtcag

SEQ ID NO: 29465 - DNA, 20 bp, Artificial Sequence
  Description of Artificial Sequence: Synthetic oligonucleotide
  Target: COL7A1; (+) strand; PAM type: YTN; PAM sequence: TTT
gtgggaatcagagagggttg

SEQ ID NO: 29466 - DNA, 20 bp, Artificial Sequence
  Description of Artificial Sequence: Synthetic oligonucleotide
  Target: COL7A1; (+) strand; PAM type: YTN; PAM sequence: TTG
tgggaatcagagagggttga

SEQ ID NO: 29467 - DNA, 20 bp, Artificial Sequence
  Description of Artificial Sequence: Synthetic oligonucleotide
  Target: COL7A1; (+) strand; PAM type: YTN; PAM sequence: TTG
aaaggtcagggggaggtcag

SEQ ID NO: 29468 - DNA, 20 bp, Artificial Sequence
  Description of Artificial Sequence: Synthetic oligonucleotide
  Target: COL7A1; (+) strand; PAM type: YTN; PAM sequence: CTC
agccctgcctgcccctcccc

SEQ ID NO: 29469 - DNA, 20 bp, Artificial Sequence
  Description of Artificial Sequence: Synthetic oligonucleotide
  Target: COL7A1; (+) strand; PAM type: YTN; PAM sequence: CTG
cctgcccctccccagacccc

SEQ ID NO: 29470 - DNA, 20 bp, Artificial Sequence
  Description of Artificial Sequence: Synthetic oligonucleotide
  Target: COL7A1; (+) strand; PAM type: YTN; PAM sequence: CTG
cccctccccagaccccgctg

SEQ ID NO: 29471 - DNA, 20 bp, Artificial Sequence
  Description of Artificial Sequence: Synthetic oligonucleotide
  Target: COL7A1; (+) strand; PAM type: YTN; PAM sequence: CTC
cccagaccccgctggcagcc

SEQ ID NO: 29472 - DNA, 20 bp, Artificial Sequence
  Description of Artificial Sequence: Synthetic oligonucleotide
  Target: COL7A1; (+) strand; PAM type: YTN; PAM sequence: CTG
gcagccccccattctcacca

SEQ ID NO: 29473 - DNA, 20 bp, Artificial Sequence
  Description of Artificial Sequence: Synthetic oligonucleotide
  Target: COL7A1; (+) strand; PAM type: YTN; PAM sequence: TTC
tcaccatcactatcccaagg

SEQ ID NO: 29474 - DNA, 20 bp, Artificial Sequence
  Description of Artificial Sequence: Synthetic oligonucleotide
  Target: COL7A1; (+) strand; PAM type: YTN; PAM sequence: CTC
accatcactatcccaaggag

SEQ ID NO: 29475 - DNA, 20 bp, Artificial Sequence
  Description of Artificial Sequence: Synthetic oligonucleotide
  Target: COL7A1; (+) strand; PAM type: YTN; PAM sequence: CTA
tcccaaggagcttcagggtc

SEQ ID NO: 29476 - DNA, 20 bp, Artificial Sequence
  Description of Artificial Sequence: Synthetic oligonucleotide
  Target: COL7A1; (+) strand; PAM type: YTN; PAM sequence: CTT
cagggtcctggtactcctcc

SEQ ID NO: 29477 - DNA, 20 bp, Artificial Sequence
  Description of Artificial Sequence: Synthetic oligonucleotide
  Target: COL7A1; (+) strand; PAM type: YTN; PAM sequence: TTC
agggtcctggtactcctcca

SEQ ID NO: 29478 - DNA, 20 bp, Artificial Sequence
  Description of Artificial Sequence: Synthetic oligonucleotide
  Target: COL7A1; (+) strand; PAM type: YTN; PAM sequence: CTG
gtactcctccacagaatact

SEQ ID NO: 29479 - DNA, 20 bp, Artificial Sequence
  Description of Artificial Sequence: Synthetic oligonucleotide
  Target: COL7A1; (+) strand; PAM type: YTN; PAM sequence: CTC
ctccacagaatactcggagt

SEQ ID NO: 29480 - DNA, 20 bp, Artificial Sequence
  Description of Artificial Sequence: Synthetic oligonucleotide
  Target: COL7A1; (+) strand; PAM type: YTN; PAM sequence: CTC
cacagaatactcggagtatt

SEQ ID NO: 29481 - DNA, 20 bp, Artificial Sequence
  Description of Artificial Sequence: Synthetic oligonucleotide
  Target: COL7A1; (+) strand; PAM type: YTN; PAM sequence: CTC
ggagtattcagagtactcat

SEQ ID NO: 29482 - DNA, 20 bp, Artificial Sequence
  Description of Artificial Sequence: Synthetic oligonucleotide
  Target: COL7A1; (+) strand; PAM type: YTN; PAM sequence: TTC
agagtactcatcatcctcag

SEQ ID NO: 29483 - DNA, 20 bp, Artificial Sequence
  Description of Artificial Sequence: Synthetic oligonucleotide
  Target: COL7A1; (+) strand; PAM type: YTN; PAM sequence: CTC
atcatcctcagggggtaccc

SEQ ID NO: 29484 - DNA, 20 bp, Artificial Sequence
  Description of Artificial Sequence: Synthetic oligonucleotide
  Target: COL7A1; (+) strand; PAM type: YTN; PAM sequence: CTC
agggggtacccgctctgcag

SEQ ID NO: 29485 - DNA, 20 bp, Artificial Sequence
  Description of Artificial Sequence: Synthetic oligonucleotide
  Target: COL7A1; (+) strand; PAM type: YTN; PAM sequence: CTC
tgcaggtagggcagggtgtg

SEQ ID NO: 29486 - DNA, 20 bp, Artificial Sequence
  Description of Artificial Sequence: Synthetic oligonucleotide
  Target: COL7A1; (+) strand; PAM type: YTN; PAM sequence: CTG
caggtagggcagggtgtgct

SEQ ID NO: 29487 - DNA, 20 bp, Artificial Sequence
  Description of Artificial Sequence: Synthetic oligonucleotide
  Target: COL7A1; (+) strand; PAM type: YTN; PAM sequence: CTG
ggagcagtggctgctggccc

SEQ ID NO: 29488 - DNA, 20 bp, Artificial Sequence
  Description of Artificial Sequence: Synthetic oligonucleotide
  Target: COL7A1; (+) strand; PAM type: YTN; PAM sequence: CTG
ctggccccggggcaaggtgg

SEQ ID NO: 29489 - DNA, 20 bp, Artificial Sequence
  Description of Artificial Sequence: Synthetic oligonucleotide
  Target: COL7A1; (+) strand; PAM type: YTN; PAM sequence: CTG
gccccggggcaaggtgggca

SEQ ID NO: 29490 - DNA, 20 bp, Artificial Sequence
  Description of Artificial Sequence: Synthetic oligonucleotide
  Target: COL7A1; (+) strand; PAM type: YTN; PAM sequence: CTG
atttccactgtgtgcacaca

SEQ ID NO: 29491 - DNA, 20 bp, Artificial Sequence
  Description of Artificial Sequence: Synthetic oligonucleotide
  Target: COL7A1; (+) strand; PAM type: YTN; PAM sequence: TTT
ccactgtgtgcacacagtgc

SEQ ID NO: 29492 - DNA, 20 bp, Artificial Sequence
  Description of Artificial Sequence: Synthetic oligonucleotide
  Target: COL7A1; (+) strand; PAM type: YTN; PAM sequence: TTC
cactgtgtgcacacagtgcc

SEQ ID NO: 29493 - DNA, 20 bp, Artificial Sequence
  Description of Artificial Sequence: Synthetic oligonucleotide
  Target: COL7A1; (+) strand; PAM type: YTN; PAM sequence: CTG
tgtgcacacagtgcccatgc

SEQ ID NO: 29494 - DNA, 20 bp, Artificial Sequence
  Description of Artificial Sequence: Synthetic oligonucleotide
  Target: COL7A1; (+) strand; PAM type: YTN; PAM sequence: CTG
catgcagaccctacgtgctt

SEQ ID NO: 29495 - DNA, 20 bp, Artificial Sequence
  Description of Artificial Sequence: Synthetic oligonucleotide
  Target: COL7A1; (+) strand; PAM type: YTN; PAM sequence: CTA
cgtgcttggcgtgtgccctg

SEQ ID NO: 29496 - DNA, 20 bp, Artificial Sequence
  Description of Artificial Sequence: Synthetic oligonucleotide
  Target: COL7A1; (+) strand; PAM type: YTN; PAM sequence: CTT
ggcgtgtgccctgcattcat

SEQ ID NO: 29497 - DNA, 20 bp, Artificial Sequence
  Description of Artificial Sequence: Synthetic oligonucleotide
  Target: COL7A1; (+) strand; PAM type: YTN; PAM sequence: TTG
gcgtgtgccctgcattcatg

SEQ ID NO: 29498 - DNA, 20 bp, Artificial Sequence
  Description of Artificial Sequence: Synthetic oligonucleotide
  Target: COL7A1; (+) strand; PAM type: YTN; PAM sequence: CTG
cattcatggacacccatgtg

SEQ ID NO: 29499 - DNA, 20 bp, Artificial Sequence
  Description of Artificial Sequence: Synthetic oligonucleotide
  Target: COL7A1; (+) strand; PAM type: YTN; PAM sequence: TTC
atggacacccatgtgcgtgt

SEQ ID NO: 29500 - DNA, 20 bp, Artificial Sequence
  Description of Artificial Sequence: Synthetic oligonucleotide
  Target: COL7A1; (+) strand; PAM type: YTN; PAM sequence: CTC
ggccccacccatagctgccc

SEQ ID NO: 29501 - DNA, 20 bp, Artificial Sequence
  Description of Artificial Sequence: Synthetic oligonucleotide
  Target: COL7A1; (+) strand; PAM type: YTN; PAM sequence: CTG
ccccacgggttcagctgtcc

SEQ ID NO: 29502 - DNA, 20 bp, Artificial Sequence
  Description of Artificial Sequence: Synthetic oligonucleotide
  Target: COL7A1; (+) strand; PAM type: YTN; PAM sequence: TTC
agctgtcctcaccttcctcc

SEQ ID NO: 29503 - DNA, 20 bp, Artificial Sequence
  Description of Artificial Sequence: Synthetic oligonucleotide
  Target: COL7A1; (+) strand; PAM type: YTN; PAM sequence: CTG
tcctcaccttcctcctctgc

SEQ ID NO: 29504 - DNA, 20 bp, Artificial Sequence
  Description of Artificial Sequence: Synthetic oligonucleotide
  Target: COL7A1; (+) strand; PAM type: YTN; PAM sequence: CTC
accttcctcctctgcatgag

SEQ ID NO: 29505 - DNA, 20 bp, Artificial Sequence
  Description of Artificial Sequence: Synthetic oligonucleotide
  Target: COL7A1; (+) strand; PAM type: YTN; PAM sequence: CTT
cctcctctgcatgagagacg

SEQ ID NO: 29506 - DNA, 20 bp, Artificial Sequence
  Description of Artificial Sequence: Synthetic oligonucleotide
  Target: COL7A1; (+) strand; PAM type: YTN; PAM sequence: TTC
ctcctctgcatgagagacgc

SEQ ID NO: 29507 - DNA, 20 bp, Artificial Sequence
  Description of Artificial Sequence: Synthetic oligonucleotide
  Target: COL7A1; (+) strand; PAM type: YTN; PAM sequence: CTC
ctctgcatgagagacgcgga

SEQ ID NO: 29508 - DNA, 20 bp, Artificial Sequence
  Description of Artificial Sequence: Synthetic oligonucleotide
  Target: COL7A1; (+) strand; PAM type: YTN; PAM sequence: CTC
tgcatgagagacgcggagca

SEQ ID NO: 29509 - DNA, 20 bp, Artificial Sequence
  Description of Artificial Sequence: Synthetic oligonucleotide
  Target: COL7A1; (+) strand; PAM type: YTN; PAM sequence: CTG
catgagagacgcggagcaca

SEQ ID NO: 29510 - DNA, 20 bp, Artificial Sequence
  Description of Artificial Sequence: Synthetic oligonucleotide
  Target: COL7A1; (+) strand; PAM type: YTN; PAM sequence: CTG
ggagccggcagtgtctgcag

SEQ ID NO: 29511 - DNA, 20 bp, Artificial Sequence
  Description of Artificial Sequence: Synthetic oligonucleotide
  Target: COL7A1; (+) strand; PAM type: YTN; PAM sequence: CTG
cagcataactagggaggggt

SEQ ID NO: 29512 - DNA, 20 bp, Artificial Sequence
  Description of Artificial Sequence: Synthetic oligonucleotide
  Target: COL7A1; (+) strand; PAM type: YTN; PAM sequence: CTA
gggaggggtcctggagccaa

SEQ ID NO: 29513 - DNA, 20 bp, Artificial Sequence
  Description of Artificial Sequence: Synthetic oligonucleotide
  Target: COL7A1; (+) strand; PAM type: YTN; PAM sequence: CTG
gagccaagagcaggggcctc

SEQ ID NO: 29514 - DNA, 20 bp, Artificial Sequence
  Description of Artificial Sequence: Synthetic oligonucleotide
  Target: COL7A1; (+) strand; PAM type: YTN; PAM sequence: CTC
agggccctgaagtcaccatg

SEQ ID NO: 29515 - DNA, 20 bp, Artificial Sequence
  Description of Artificial Sequence: Synthetic oligonucleotide
  Target: COL7A1; (+) strand; PAM type: YTN; PAM sequence: CTG
aagtcaccatgggcagccat

SEQ ID NO: 29516 - DNA, 20 bp, Artificial Sequence
  Description of Artificial Sequence: Synthetic oligonucleotide
  Target: COL7A1; (+) strand; PAM type: YTN; PAM sequence: CTG
agaggaccccagttgatagg

SEQ ID NO: 29517 - DNA, 20 bp, Artificial Sequence
  Description of Artificial Sequence: Synthetic oligonucleotide
  Target: COL7A1; (+) strand; PAM type: YTN; PAM sequence: TTG
ataggcagggcagggcctgg

SEQ ID NO: 29518 - DNA, 20 bp, Artificial Sequence
  Description of Artificial Sequence: Synthetic oligonucleotide
  Target: COL7A1; (+) strand; PAM type: YTN; PAM sequence: CTG
gggtgaagaaagttctggga

SEQ ID NO: 29519 - DNA, 20 bp, Artificial Sequence
  Description of Artificial Sequence: Synthetic oligonucleotide
  Target: COL7A1; (+) strand; PAM type: YTN; PAM sequence: TTC
tgggagtagaaaactactca

SEQ ID NO: 29520 - DNA, 20 bp, Artificial Sequence
  Description of Artificial Sequence: Synthetic oligonucleotide
  Target: COL7A1; (+) strand; PAM type: YTN; PAM sequence: CTG
ggagtagaaaactactcacg

SEQ ID NO: 29521 - DNA, 20 bp, Artificial Sequence
  Description of Artificial Sequence: Synthetic oligonucleotide
  Target: COL7A1; (+) strand; PAM type: YTN; PAM sequence: CTA
ctcacgtgatccagatgcga

SEQ ID NO: 29522 - DNA, 20 bp, Artificial Sequence
  Description of Artificial Sequence: Synthetic oligonucleotide
  Target: COL7A1; (+) strand; PAM type: YTN; PAM sequence: CTC
acgtgatccagatgcgatga

SEQ ID NO: 29523 - DNA, 20 bp, Artificial Sequence
  Description of Artificial Sequence: Synthetic oligonucleotide
  Target: COL7A1; (+) strand; PAM type: YTN; PAM sequence: CTG
gccctggcaggctagagggg

SEQ ID NO: 29524 - DNA, 20 bp, Artificial Sequence
  Description of Artificial Sequence: Synthetic oligonucleotide
  Target: COL7A1; (+) strand; PAM type: YTN; PAM sequence: CTG
gcaggctagagggggcagag

SEQ ID NO: 29525 - DNA, 20 bp, Artificial Sequence
  Description of Artificial Sequence: Synthetic oligonucleotide
  Target: COL7A1; (+) strand; PAM type: YTN; PAM sequence: CTA
gagggggcagagagggatag

SEQ ID NO: 29526 - DNA, 20 bp, Artificial Sequence
  Description of Artificial Sequence: Synthetic oligonucleotide
  Target: COL7A1; (+) strand; PAM type: YTN; PAM sequence: TTG
ggaacaggccaacaaaaggc

SEQ ID NO: 29527 - DNA, 20 bp, Artificial Sequence
  Description of Artificial Sequence: Synthetic oligonucleotide
  Target: COL7A1; (+) strand; PAM type: YTN; PAM sequence: CTT
cactctgatgcccctcccac

SEQ ID NO: 29528 - DNA, 20 bp, Artificial Sequence
  Description of Artificial Sequence: Synthetic oligonucleotide
  Target: COL7A1; (+) strand; PAM type: YTN; PAM sequence: TTC
actctgatgcccctcccacc

SEQ ID NO: 29529 - DNA, 20 bp, Artificial Sequence
  Description of Artificial Sequence: Synthetic oligonucleotide
  Target: COL7A1; (+) strand; PAM type: YTN; PAM sequence: CTC
tgatgcccctcccaccgggt

SEQ ID NO: 29530 - DNA, 20 bp, Artificial Sequence
  Description of Artificial Sequence: Synthetic oligonucleotide
  Target: COL7A1; (+) strand; PAM type: YTN; PAM sequence: CTG
atgcccctcccaccgggtcc

SEQ ID NO: 29531 - DNA, 20 bp, Artificial Sequence
  Description of Artificial Sequence: Synthetic oligonucleotide
  Target: COL7A1; (+) strand; PAM type: YTN; PAM sequence: CTC
ccaccgggtccaggtcaggc

SEQ ID NO: 29532 - DNA, 20 bp, Artificial Sequence
  Description of Artificial Sequence: Synthetic oligonucleotide
  Target: COL7A1; (+) strand; PAM type: YTN; PAM sequence: CTC
tgctcccaccatcatcccac

SEQ ID NO: 29533 - DNA, 20 bp, Artificial Sequence
  Description of Artificial Sequence: Synthetic oligonucleotide
  Target: COL7A1; (+) strand; PAM type: YTN; PAM sequence: CTG
ctcccaccatcatcccactc

SEQ ID NO: 29534 - DNA, 20 bp, Artificial Sequence
  Description of Artificial Sequence: Synthetic oligonucleotide
  Target: COL7A1; (+) strand; PAM type: YTN; PAM sequence: CTC
ccaccatcatcccactcccc

SEQ ID NO: 29535 - DNA, 20 bp, Artificial Sequence
  Description of Artificial Sequence: Synthetic oligonucleotide
  Target: COL7A1; (+) strand; PAM type: YTN; PAM sequence: CTC
cccacacagccaagctggac

SEQ ID NO: 29536 - DNA, 20 bp, Artificial Sequence
  Description of Artificial Sequence: Synthetic oligonucleotide
  Target: COL7A1; (+) strand; PAM type: YTN; PAM sequence: CTG
gacatctgagagcactgcat

SEQ ID NO: 29537 - DNA, 20 bp, Artificial Sequence
  Description of Artificial Sequence: Synthetic oligonucleotide
  Target: COL7A1; (+) strand; PAM type: YTN; PAM sequence: CTG
agagcactgcatggcaatcc

SEQ ID NO: 29538 - DNA, 20 bp, Artificial Sequence
  Description of Artificial Sequence: Synthetic oligonucleotide
  Target: COL7A1; (+) strand; PAM type: YTN; PAM sequence: CTG
catggcaatcctcatctgcc

SEQ ID NO: 29539 - DNA, 20 bp, Artificial Sequence
  Description of Artificial Sequence: Synthetic oligonucleotide
  Target: COL7A1; (+) strand; PAM type: YTN; PAM sequence: CTC
atctgcctgtgtgtctccct

SEQ ID NO: 29540 - DNA, 20 bp, Artificial Sequence
  Description of Artificial Sequence: Synthetic oligonucleotide
  Target: COL7A1; (+) strand; PAM type: YTN; PAM sequence: CTG
cctgtgtgtctccctccact

SEQ ID NO: 29541 - DNA, 20 bp, Artificial Sequence
  Description of Artificial Sequence: Synthetic oligonucleotide
  Target: COL7A1; (+) strand; PAM type: YTN; PAM sequence: CTG
tgtgtctccctccactgggg

SEQ ID NO: 29542 - DNA, 20 bp, Artificial Sequence
  Description of Artificial Sequence: Synthetic oligonucleotide
  Target: COL7A1; (+) strand; PAM type: YTN; PAM sequence: CTC
cctccactggggacacatgt

SEQ ID NO: 29543 - DNA, 20 bp, Artificial Sequence
  Description of Artificial Sequence: Synthetic oligonucleotide
  Target: COL7A1; (+) strand; PAM type: YTN; PAM sequence: CTC
cactggggacacatgtcatg

SEQ ID NO: 29544 - DNA, 20 bp, Artificial Sequence
  Description of Artificial Sequence: Synthetic oligonucleotide
  Target: COL7A1; (+) strand; PAM type: YTN; PAM sequence: CTG
gggacacatgtcatgtgtca

SEQ ID NO: 29545 - DNA, 20 bp, Artificial Sequence
  Description of Artificial Sequence: Synthetic oligonucleotide
  Target: COL7A1; (+) strand; PAM type: YTN; PAM sequence: CTG
cagcacatgtgtccttctgt

SEQ ID NO: 29546 - DNA, 20 bp, Artificial Sequence
  Description of Artificial Sequence: Synthetic oligonucleotide
  Target: COL7A1; (+) strand; PAM type: YTN; PAM sequence: CTT
ctgtgtatccatccatcccc

SEQ ID NO: 29547 - DNA, 20 bp, Artificial Sequence
  Description of Artificial Sequence: Synthetic oligonucleotide
  Target: COL7A1; (+) strand; PAM type: YTN; PAM sequence: TTC
tgtgtatccatccatccccc

SEQ ID NO: 29548 - DNA, 20 bp, Artificial Sequence
  Description of Artificial Sequence: Synthetic oligonucleotide
  Target: COL7A1; (+) strand; PAM type: YTN; PAM sequence: CTG
tgtatccatccatcccccca

SEQ ID NO: 29549 - DNA, 20 bp, Artificial Sequence
  Description of Artificial Sequence: Synthetic oligonucleotide
  Target: COL7A1; (+) strand; PAM type: YTN; PAM sequence: CTT
cttgactgcttgccctgtaa

SEQ ID NO: 29550 - DNA, 20 bp, Artificial Sequence
  Description of Artificial Sequence: Synthetic oligonucleotide
  Target: COL7A1; (+) strand; PAM type: YTN; PAM sequence: TTC
ttgactgcttgccctgtaag

SEQ ID NO: 29551 - DNA, 20 bp, Artificial Sequence
  Description of Artificial Sequence: Synthetic oligonucleotide
  Target: COL7A1; (+) strand; PAM type: YTN; PAM sequence: CTT
gactgcttgccctgtaagtt

SEQ ID NO: 29552 - DNA, 20 bp, Artificial Sequence
  Description of Artificial Sequence: Synthetic oligonucleotide
  Target: COL7A1; (+) strand; PAM type: YTN; PAM sequence: TTG
actgcttgccctgtaagttc

SEQ ID NO: 29553 - DNA, 20 bp, Artificial Sequence
  Description of Artificial Sequence: Synthetic oligonucleotide
  Target: COL7A1; (+) strand; PAM type: YTN; PAM sequence: CTG
cttgccctgtaagttctagg

SEQ ID NO: 29554 - DNA, 20 bp, Artificial Sequence
  Description of Artificial Sequence: Synthetic oligonucleotide
  Target: COL7A1; (+) strand; PAM type: YTN; PAM sequence: CTT
gccctgtaagttctaggggc

SEQ ID NO: 29555 - DNA, 20 bp, Artificial Sequence
  Description of Artificial Sequence: Synthetic oligonucleotide
  Target: COL7A1; (+) strand; PAM type: YTN; PAM sequence: TTG
ccctgtaagttctaggggcc

SEQ ID NO: 29556 - DNA, 20 bp, Artificial Sequence
  Description of Artificial Sequence: Synthetic oligonucleotide
  Target: COL7A1; (+) strand; PAM type: YTN; PAM sequence: CTG
taagttctaggggcctgcct

SEQ ID NO: 29557 - DNA, 20 bp, Artificial Sequence
  Description of Artificial Sequence: Synthetic oligonucleotide
  Target: COL7A1; (+) strand; PAM type: YTN; PAM sequence: TTC
taggggcctgcctgcccttg

SEQ ID NO: 29558 - DNA, 20 bp, Artificial Sequence
  Description of Artificial Sequence: Synthetic oligonucleotide
  Target: COL7A1; (+) strand; PAM type: YTN; PAM sequence: CTA
ggggcctgcctgcccttgcc

SEQ ID NO: 29559 - DNA, 20 bp, Artificial Sequence
  Description of Artificial Sequence: Synthetic oligonucleotide
  Target: COL7A1; (+) strand; PAM type: YTN; PAM sequence: CTG
cctgcccttgcctagggtgc

SEQ ID NO: 29560 - DNA, 20 bp, Artificial Sequence
  Description of Artificial Sequence: Synthetic oligonucleotide
  Target: COL7A1; (+) strand; PAM type: YTN; PAM sequence: CTG
cccttgcctagggtgctggg

SEQ ID NO: 29561 - DNA, 20 bp, Artificial Sequence
  Description of Artificial Sequence: Synthetic oligonucleotide
  Target: COL7A1; (+) strand; PAM type: YTN; PAM sequence: CTT
gcctagggtgctggggtgga

SEQ ID NO: 29562 - DNA, 20 bp, Artificial Sequence
  Description of Artificial Sequence: Synthetic oligonucleotide
  Target: COL7A1; (+) strand; PAM type: YTN; PAM sequence: TTG
cctagggtgctggggtggag

SEQ ID NO: 29563 - DNA, 20 bp, Artificial Sequence
  Description of Artificial Sequence: Synthetic oligonucleotide
  Target: COL7A1; (+) strand; PAM type: YTN; PAM sequence: CTA
gggtgctggggtggagtggg

SEQ ID NO: 29564 - DNA, 20 bp, Artificial Sequence
  Description of Artificial Sequence: Synthetic oligonucleotide
  Target: COL7A1; (+) strand; PAM type: YTN; PAM sequence: CTG
gggtggagtgggagactgcg

SEQ ID NO: 29565 - DNA, 20 bp, Artificial Sequence
  Description of Artificial Sequence: Synthetic oligonucleotide
  Target: COL7A1; (+) strand; PAM type: YTN; PAM sequence: CTG
cgggctgggcaccactcacc

SEQ ID NO: 29566 - DNA, 20 bp, Artificial Sequence
  Description of Artificial Sequence: Synthetic oligonucleotide
  Target: COL7A1; (+) strand; PAM type: YTN; PAM sequence: CTG
ggcaccactcaccacagtgc

SEQ ID NO: 29567 - DNA, 20 bp, Artificial Sequence
  Description of Artificial Sequence: Synthetic oligonucleotide
  Target: COL7A1; (+) strand; PAM type: YTN; PAM sequence: CTC
accacagtgctgactcatct

SEQ ID NO: 29568 - DNA, 20 bp, Artificial Sequence
  Description of Artificial Sequence: Synthetic oligonucleotide
  Target: COL7A1; (+) strand; PAM type: YTN; PAM sequence: CTG
actcatctcttggcgcacaa

SEQ ID NO: 29569 - DNA, 20 bp, Artificial Sequence
  Description of Artificial Sequence: Synthetic oligonucleotide
  Target: COL7A1; (+) strand; PAM type: YTN; PAM sequence: CTC
atctcttggcgcacaaagcc

SEQ ID NO: 29570 - DNA, 20 bp, Artificial Sequence
  Description of Artificial Sequence: Synthetic oligonucleotide
  Target: COL7A1; (+) strand; PAM type: YTN; PAM sequence: CTC
ttggcgcacaaagccccgga

SEQ ID NO: 29571 - DNA, 20 bp, Artificial Sequence
  Description of Artificial Sequence: Synthetic oligonucleotide
  Target: COL7A1; (+) strand; PAM type: YTN; PAM sequence: CTT
ggcgcacaaagccccggatg

SEQ ID NO: 29572 - DNA, 20 bp, Artificial Sequence
  Description of Artificial Sequence: Synthetic oligonucleotide
  Target: COL7A1; (+) strand; PAM type: YTN; PAM sequence: TTG
gcgcacaaagccccggatgt

SEQ ID NO: 29573 - DNA, 20 bp, Artificial Sequence
  Description of Artificial Sequence: Synthetic oligonucleotide
  Target: COL7A1; (+) strand; PAM type: YTN; PAM sequence: CTC
ctgggagcagaagaccacag

SEQ ID NO: 29574 - DNA, 20 bp, Artificial Sequence
  Description of Artificial Sequence: Synthetic oligonucleotide
  Target: COL7A1; (+) strand; PAM type: YTN; PAM sequence: CTG
ggagcagaagaccacaggga

SEQ ID NO: 29575 - DNA, 20 bp, Artificial Sequence
  Description of Artificial Sequence: Synthetic oligonucleotide
  Target: COL7A1; (+) strand; PAM type: YTN; PAM sequence: CTA
tggtgagactgcatggagcc

SEQ ID NO: 29576 - DNA, 20 bp, Artificial Sequence
  Description of Artificial Sequence: Synthetic oligonucleotide
  Target: COL7A1; (+) strand; PAM type: YTN; PAM sequence: CTG
catggagccagggcccaggg

SEQ ID NO: 29577 - DNA, 20 bp, Artificial Sequence
  Description of Artificial Sequence: Synthetic oligonucleotide
  Target: COL7A1; (+) strand; PAM type: YTN; PAM sequence: CTG
ggtgagggaggtagggcccc

SEQ ID NO: 29578 - DNA, 20 bp, Artificial Sequence
  Description of Artificial Sequence: Synthetic oligonucleotide
  Target: COL7A1; (+) strand; PAM type: YTN; PAM sequence: CTC
ccaggcccatccaggcccac

SEQ ID NO: 29579 - DNA, 20 bp, Artificial Sequence
  Description of Artificial Sequence: Synthetic oligonucleotide
  Target: COL7A1; (+) strand; PAM type: YTN; PAM sequence: CTC
accgtcagtgcagcttctcc

SEQ ID NO: 29580 - DNA, 20 bp, Artificial Sequence
  Description of Artificial Sequence: Synthetic oligonucleotide
  Target: COL7A1; (+) strand; PAM type: YTN; PAM sequence: CTT
ctcccttctcgcctcgagga

SEQ ID NO: 29581 - DNA, 20 bp, Artificial Sequence
  Description of Artificial Sequence: Synthetic oligonucleotide
  Target: COL7A1; (+) strand; PAM type: YTN; PAM sequence: TTC
tcccttctcgcctcgaggac

SEQ ID NO: 29582 - DNA, 20 bp, Artificial Sequence
  Description of Artificial Sequence: Synthetic oligonucleotide
  Target: COL7A1; (+) strand; PAM type: YTN; PAM sequence: CTC
ccttctcgcctcgaggaccg

SEQ ID NO: 29583 - DNA, 20 bp, Artificial Sequence
  Description of Artificial Sequence: Synthetic oligonucleotide
  Target: COL7A1; (+) strand; PAM type: YTN; PAM sequence: CTT
ctcgcctcgaggaccggcag

SEQ ID NO: 29584 - DNA, 20 bp, Artificial Sequence
  Description of Artificial Sequence: Synthetic oligonucleotide
  Target: COL7A1; (+) strand; PAM type: YTN; PAM sequence: TTC
tcgcctcgaggaccggcagg

SEQ ID NO: 29585 - DNA, 20 bp, Artificial Sequence
  Description of Artificial Sequence: Synthetic oligonucleotide
  Target: COL7A1; (+) strand; PAM type: YTN; PAM sequence: CTC
gcctcgaggaccggcaggcc

SEQ ID NO: 29586 - DNA, 20 bp, Artificial Sequence
  Description of Artificial Sequence: Synthetic oligonucleotide
  Target: COL7A1; (+) strand; PAM type: YTN; PAM sequence: CTC
gaggaccggcaggccctggc

SEQ ID NO: 29587 - DNA, 20 bp, Artificial Sequence
  Description of Artificial Sequence: Synthetic oligonucleotide
  Target: COL7A1; (+) strand; PAM type: YTN; PAM sequence: CTG
gccgcccctatgtgcaacag

SEQ ID NO: 29588 - DNA, 20 bp, Artificial Sequence
  Description of Artificial Sequence: Synthetic oligonucleotide
  Target: COL7A1; (+) strand; PAM type: YTN; PAM sequence: CTA
tgtgcaacagatgggaccag

SEQ ID NO: 29589 - DNA, 20 bp, Artificial Sequence
  Description of Artificial Sequence: Synthetic oligonucleotide
  Target: COL7A1; (+) strand; PAM type: YTN; PAM sequence: CTG
tgacctctgacctcagggac

SEQ ID NO: 29590 - DNA, 20 bp, Artificial Sequence
  Description of Artificial Sequence: Synthetic oligonucleotide
  Target: COL7A1; (+) strand; PAM type: YTN; PAM sequence: CTC
tgacctcagggacaacagaa

SEQ ID NO: 29591 - DNA, 20 bp, Artificial Sequence
  Description of Artificial Sequence: Synthetic oligonucleotide
  Target: COL7A1; (+) strand; PAM type: YTN; PAM sequence: CTG
acctcagggacaacagaagt

SEQ ID NO: 29592 - DNA, 20 bp, Artificial Sequence
  Description of Artificial Sequence: Synthetic oligonucleotide
  Target: COL7A1; (+) strand; PAM type: YTN; PAM sequence: CTC
agggacaacagaagtcaccc

SEQ ID NO: 29593 - DNA, 20 bp, Artificial Sequence
  Description of Artificial Sequence: Synthetic oligonucleotide
  Target: COL7A1; (+) strand; PAM type: YTN; PAM sequence: CTC
tgacccaagccttggaatcc

SEQ ID NO: 29594 - DNA, 20 bp, Artificial Sequence
  Description of Artificial Sequence: Synthetic oligonucleotide
  Target: COL7A1; (+) strand; PAM type: YTN; PAM sequence: CTG
acccaagccttggaatccct

SEQ ID NO: 29595 - DNA, 20 bp, Artificial Sequence
  Description of Artificial Sequence: Synthetic oligonucleotide
  Target: COL7A1; (+) strand; PAM type: YTN; PAM sequence: CTT
ggaatccctactcacctgct

SEQ ID NO: 29596 - DNA, 20 bp, Artificial Sequence
  Description of Artificial Sequence: Synthetic oligonucleotide
  Target: COL7A1; (+) strand; PAM type: YTN; PAM sequence: TTG
gaatccctactcacctgctc

SEQ ID NO: 29597 - DNA, 20 bp, Artificial Sequence
  Description of Artificial Sequence: Synthetic oligonucleotide
  Target: COL7A1; (+) strand; PAM type: YTN; PAM sequence: CTA
ctcacctgctcccctctctc

SEQ ID NO: 29598 - DNA, 20 bp, Artificial Sequence
  Description of Artificial Sequence: Synthetic oligonucleotide
  Target: COL7A1; (+) strand; PAM type: YTN; PAM sequence: CTC
acctgctcccctctctcgcc

SEQ ID NO: 29599 - DNA, 20 bp, Artificial Sequence
  Description of Artificial Sequence: Synthetic oligonucleotide
  Target: COL7A1; (+) strand; PAM type: YTN; PAM sequence: CTG
ctcccctctctcgccaggag

SEQ ID NO: 29600 - DNA, 20 bp, Artificial Sequence
  Description of Artificial Sequence: Synthetic oligonucleotide
  Target: COL7A1; (+) strand; PAM type: YTN; PAM sequence: CTC
ccctctctcgccaggagctc

SEQ ID NO: 29601 - DNA, 20 bp, Artificial Sequence
  Description of Artificial Sequence: Synthetic oligonucleotide
  Target: COL7A1; (+) strand; PAM type: YTN; PAM sequence: CTC
tctcgccaggagctccaggg

SEQ ID NO: 29602 - DNA, 20 bp, Artificial Sequence
  Description of Artificial Sequence: Synthetic oligonucleotide
  Target: COL7A1; (+) strand; PAM type: YTN; PAM sequence: CTC
tcgccaggagctccagggac

SEQ ID NO: 29603 - DNA, 20 bp, Artificial Sequence
  Description of Artificial Sequence: Synthetic oligonucleotide
  Target: COL7A1; (+) strand; PAM type: YTN; PAM sequence: CTC
gccaggagctccagggaccc

SEQ ID NO: 29604 - DNA, 20 bp, Artificial Sequence
  Description of Artificial Sequence: Synthetic oligonucleotide
  Target: COL7A1; (+) strand; PAM type: YTN; PAM sequence: CTC
cagggaccccaggagccccc

SEQ ID NO: 29605 - DNA, 20 bp, Artificial Sequence
  Description of Artificial Sequence: Synthetic oligonucleotide
  Target: COL7A1; (+) strand; PAM type: YTN; PAM sequence: CTC
tctctccggggggacctcgc

SEQ ID NO: 29606 - DNA, 20 bp, Artificial Sequence
  Description of Artificial Sequence: Synthetic oligonucleotide
  Target: COL7A1; (+) strand; PAM type: YTN; PAM sequence: CTC
tctccggggggacctcgctc

SEQ ID NO: 29607 - DNA, 20 bp, Artificial Sequence
  Description of Artificial Sequence: Synthetic oligonucleotide
  Target: COL7A1; (+) strand; PAM type: YTN; PAM sequence: CTC
tccggggggacctcgctcac

SEQ ID NO: 29608 - DNA, 20 bp, Artificial Sequence
  Description of Artificial Sequence: Synthetic oligonucleotide
  Target: COL7A1; (+) strand; PAM type: YTN; PAM sequence: CTC
cggggggacctcgctcaccc

SEQ ID NO: 29609 - DNA, 20 bp, Artificial Sequence
  Description of Artificial Sequence: Synthetic oligonucleotide
  Target: COL7A1; (+) strand; PAM type: YTN; PAM sequence: CTC
gctcaccctgtcagacacag

SEQ ID NO: 29610 - DNA, 20 bp, Artificial Sequence
  Description of Artificial Sequence: Synthetic oligonucleotide
  Target: COL7A1; (+) strand; PAM type: YTN; PAM sequence: CTC
accctgtcagacacagggac

SEQ ID NO: 29611 - DNA, 20 bp, Artificial Sequence
  Description of Artificial Sequence: Synthetic oligonucleotide
  Target: COL7A1; (+) strand; PAM type: YTN; PAM sequence: CTG
tcagacacagggaccaagtg

SEQ ID NO: 29612 - DNA, 20 bp, Artificial Sequence
  Description of Artificial Sequence: Synthetic oligonucleotide
  Target: COL7A1; (+) strand; PAM type: YTN; PAM sequence: TTG
ggggccacagcttcagaggt

SEQ ID NO: 29613 - DNA, 20 bp, Artificial Sequence
  Description of Artificial Sequence: Synthetic oligonucleotide
  Target: COL7A1; (+) strand; PAM type: YTN; PAM sequence: CTT
cagaggttggggcaggcagg

SEQ ID NO: 29614 - DNA, 20 bp, Artificial Sequence
  Description of Artificial Sequence: Synthetic oligonucleotide
  Target: COL7A1; (+) strand; PAM type: YTN; PAM sequence: TTC
agaggttggggcaggcaggc

SEQ ID NO: 29615 - DNA, 20 bp, Artificial Sequence
  Description of Artificial Sequence: Synthetic oligonucleotide
  Target: COL7A1; (+) strand; PAM type: YTN; PAM sequence: TTG
gggcaggcaggctggaagat

SEQ ID NO: 29616 - DNA, 20 bp, Artificial Sequence
  Description of Artificial Sequence: Synthetic oligonucleotide
  Target: COL7A1; (+) strand; PAM type: YTN; PAM sequence: CTG
gaagatggttatgaggttgg

SEQ ID NO: 29617 - DNA, 20 bp, Artificial Sequence
  Description of Artificial Sequence: Synthetic oligonucleotide
  Target: COL7A1; (+) strand; PAM type: YTN; PAM sequence: TTA
tgaggttggaagggtaggga

SEQ ID NO: 29618 - DNA, 20 bp, Artificial Sequence
  Description of Artificial Sequence: Synthetic oligonucleotide
  Target: COL7A1; (+) strand; PAM type: YTN; PAM sequence: TTG
gaagggtagggaaggttcag

SEQ ID NO: 29619 - DNA, 20 bp, Artificial Sequence
  Description of Artificial Sequence: Synthetic oligonucleotide
  Target: COL7A1; (+) strand; PAM type: YTN; PAM sequence: TTC
agggatcaggagtcagagct

SEQ ID NO: 29620 - DNA, 20 bp, Artificial Sequence
  Description of Artificial Sequence: Synthetic oligonucleotide
  Target: COL7A1; (+) strand; PAM type: YTN; PAM sequence: CTG
gggccccttaccttctggcc

SEQ ID NO: 29621 - DNA, 20 bp, Artificial Sequence
  Description of Artificial Sequence: Synthetic oligonucleotide
  Target: COL7A1; (+) strand; PAM type: YTN; PAM sequence: CTT
accttctggccctgaagtcc

SEQ ID NO: 29622 - DNA, 20 bp, Artificial Sequence
  Description of Artificial Sequence: Synthetic oligonucleotide
  Target: COL7A1; (+) strand; PAM type: YTN; PAM sequence: TTA
ccttctggccctgaagtcct

SEQ ID NO: 29623 - DNA, 20 bp, Artificial Sequence
  Description of Artificial Sequence: Synthetic oligonucleotide
  Target: COL7A1; (+) strand; PAM type: YTN; PAM sequence: CTT
ctggccctgaagtccttcgg

SEQ ID NO: 29624 - DNA, 20 bp, Artificial Sequence
  Description of Artificial Sequence: Synthetic oligonucleotide
  Target: COL7A1; (+) strand; PAM type: YTN; PAM sequence: TTC
tggccctgaagtccttcggg

SEQ ID NO: 29625 - DNA, 20 bp, Artificial Sequence
  Description of Artificial Sequence: Synthetic oligonucleotide
  Target: COL7A1; (+) strand; PAM type: YTN; PAM sequence: CTG
gccctgaagtccttcggggc

SEQ ID NO: 29626 - DNA, 20 bp, Artificial Sequence
  Description of Artificial Sequence: Synthetic oligonucleotide
  Target: COL7A1; (+) strand; PAM type: YTN; PAM sequence: CTG
aagtccttcggggcctctgg

SEQ ID NO: 29627 - DNA, 20 bp, Artificial Sequence
  Description of Artificial Sequence: Synthetic oligonucleotide
  Target: COL7A1; (+) strand; PAM type: YTN; PAM sequence: CTT
cggggcctctgggaccaaca

SEQ ID NO: 29628 - DNA, 20 bp, Artificial Sequence
  Description of Artificial Sequence: Synthetic oligonucleotide
  Target: COL7A1; (+) strand; PAM type: YTN; PAM sequence: TTC
ggggcctctgggaccaacac

SEQ ID NO: 29629 - DNA, 20 bp, Artificial Sequence
  Description of Artificial Sequence: Synthetic oligonucleotide
  Target: COL7A1; (+) strand; PAM type: YTN; PAM sequence: CTC
tgggaccaacactgccaggt

SEQ ID NO: 29630 - DNA, 20 bp, Artificial Sequence
  Description of Artificial Sequence: Synthetic oligonucleotide
  Target: COL7A1; (+) strand; PAM type: YTN; PAM sequence: CTG
ggaccaacactgccaggtgg

SEQ ID NO: 29631 - DNA, 20 bp, Artificial Sequence
  Description of Artificial Sequence: Synthetic oligonucleotide
  Target: COL7A1; (+) strand; PAM type: YTN; PAM sequence: CTG
ccaggtggccctgggggacc

SEQ ID NO: 29632 - DNA, 20 bp, Artificial Sequence
  Description of Artificial Sequence: Synthetic oligonucleotide
  Target: COL7A1; (+) strand; PAM type: YTN; PAM sequence: CTG
ggggaccagcagagccatca

SEQ ID NO: 29633 - DNA, 20 bp, Artificial Sequence
  Description of Artificial Sequence: Synthetic oligonucleotide
  Target: COL7A1; (+) strand; PAM type: YTN; PAM sequence: TTT
ccactggggcctgggaagcc

SEQ ID NO: 29634 - DNA, 20 bp, Artificial Sequence
  Description of Artificial Sequence: Synthetic oligonucleotide
  Target: COL7A1; (+) strand; PAM type: YTN; PAM sequence: TTC
cactggggcctgggaagccc

SEQ ID NO: 29635 - DNA, 20 bp, Artificial Sequence
  Description of Artificial Sequence: Synthetic oligonucleotide
  Target: COL7A1; (+) strand; PAM type: YTN; PAM sequence: CTG
gggcctgggaagcccccaat

SEQ ID NO: 29636 - DNA, 20 bp, Artificial Sequence
  Description of Artificial Sequence: Synthetic oligonucleotide
  Target: COL7A1; (+) strand; PAM type: YTN; PAM sequence: CTG
ggaagcccccaattcctggg

SEQ ID NO: 29637 - DNA, 20 bp, Artificial Sequence
  Description of Artificial Sequence: Synthetic oligonucleotide
  Target: COL7A1; (+) strand; PAM type: YTN; PAM sequence: TTC
ctggggttccctggggagat

SEQ ID NO: 29638 - DNA, 20 bp, Artificial Sequence
  Description of Artificial Sequence: Synthetic oligonucleotide
  Target: COL7A1; (+) strand; PAM type: YTN; PAM sequence: CTG
gggttccctggggagatata

SEQ ID NO: 29639 - DNA, 20 bp, Artificial Sequence
  Description of Artificial Sequence: Synthetic oligonucleotide
  Target: COL7A1; (+) strand; PAM type: YTN; PAM sequence: TTC
cctggggagatataggacag

SEQ ID NO: 29640 - DNA, 20 bp, Artificial Sequence
  Description of Artificial Sequence: Synthetic oligonucleotide
  Target: COL7A1; (+) strand; PAM type: YTN; PAM sequence: CTG
gggagatataggacagagtc

SEQ ID NO: 29641 - DNA, 20 bp, Artificial Sequence
  Description of Artificial Sequence: Synthetic oligonucleotide
  Target: COL7A1; (+) strand; PAM type: YTN; PAM sequence: CTC
tcccaaagtgcacgctcccc

SEQ ID NO: 29642 - DNA, 20 bp, Artificial Sequence
  Description of Artificial Sequence: Synthetic oligonucleotide
  Target: COL7A1; (+) strand; PAM type: YTN; PAM sequence: CTC
ccaaagtgcacgctcccctc

SEQ ID NO: 29643 - DNA, 20 bp, Artificial Sequence
  Description of Artificial Sequence: Synthetic oligonucleotide
  Target: COL7A1; (+) strand; PAM type: YTN; PAM sequence: CTC
ccctcaattcaccatgacca

SEQ ID NO: 29644 - DNA, 20 bp, Artificial Sequence
  Description of Artificial Sequence: Synthetic oligonucleotide
  Target: COL7A1; (+) strand; PAM type: YTN; PAM sequence: CTC
aattcaccatgaccatggct

SEQ ID NO: 29645 - DNA, 20 bp, Artificial Sequence
  Description of Artificial Sequence: Synthetic oligonucleotide
  Target: COL7A1; (+) strand; PAM type: YTN; PAM sequence: TTC
accatgaccatggcttcaac

SEQ ID NO: 29646 - DNA, 20 bp, Artificial Sequence
  Description of Artificial Sequence: Synthetic oligonucleotide
  Target: COL7A1; (+) strand; PAM type: YTN; PAM sequence: CTT
caactcacccgctccccttt

SEQ ID NO: 29647 - DNA, 20 bp, Artificial Sequence
  Description of Artificial Sequence: Synthetic oligonucleotide
  Target: COL7A1; (+) strand; PAM type: YTN; PAM sequence: TTC
aactcacccgctcccctttc

SEQ ID NO: 29648 - DNA, 20 bp, Artificial Sequence
  Description of Artificial Sequence: Synthetic oligonucleotide
  Target: COL7A1; (+) strand; PAM type: YTN; PAM sequence: CTC
acccgctcccctttctcgcc

SEQ ID NO: 29649 - DNA, 20 bp, Artificial Sequence
  Description of Artificial Sequence: Synthetic oligonucleotide
  Target: COL7A1; (+) strand; PAM type: YTN; PAM sequence: CTC
ccctttctcgccctggtcac

SEQ ID NO: 29650 - DNA, 20 bp, Artificial Sequence
  Description of Artificial Sequence: Synthetic oligonucleotide
  Target: COL7A1; (+) strand; PAM type: YTN; PAM sequence: CTT
tctcgccctggtcacccttg

SEQ ID NO: 29651 - DNA, 20 bp, Artificial Sequence
  Description of Artificial Sequence: Synthetic oligonucleotide
  Target: COL7A1; (+) strand; PAM type: YTN; PAM sequence: TTT
ctcgccctggtcacccttgg

SEQ ID NO: 29652 - DNA, 20 bp, Artificial Sequence
  Description of Artificial Sequence: Synthetic oligonucleotide
  Target: COL7A1; (+) strand; PAM type: YTN; PAM sequence: TTC
tcgccctggtcacccttggg

SEQ ID NO: 29653 - DNA, 20 bp, Artificial Sequence
  Description of Artificial Sequence: Synthetic oligonucleotide
  Target: COL7A1; (+) strand; PAM type: YTN; PAM sequence: CTC
gccctggtcacccttggggc

SEQ ID NO: 29654 - DNA, 20 bp, Artificial Sequence
  Description of Artificial Sequence: Synthetic oligonucleotide
  Target: COL7A1; (+) strand; PAM type: YTN; PAM sequence: CTG
gtcacccttggggcctggct

SEQ ID NO: 29655 - DNA, 20 bp, Artificial Sequence
  Description of Artificial Sequence: Synthetic oligonucleotide
  Target: COL7A1; (+) strand; PAM type: YTN; PAM sequence: CTT
ggggcctggctgcccgtcaa

SEQ ID NO: 29656 - DNA, 20 bp, Artificial Sequence
  Description of Artificial Sequence: Synthetic oligonucleotide
  Target: COL7A1; (+) strand; PAM type: YTN; PAM sequence: TTG
gggcctggctgcccgtcaaa

SEQ ID NO: 29657 - DNA, 20 bp, Artificial Sequence
  Description of Artificial Sequence: Synthetic oligonucleotide
  Target: COL7A1; (+) strand; PAM type: YTN; PAM sequence: CTG
gctgcccgtcaaagcctcgg

SEQ ID NO: 29658 - DNA, 20 bp, Artificial Sequence
  Description of Artificial Sequence: Synthetic oligonucleotide
  Target: COL7A1; (+) strand; PAM type: YTN; PAM sequence: CTG
cccgtcaaagcctcggtcac

SEQ ID NO: 29659 - DNA, 20 bp, Artificial Sequence
  Description of Artificial Sequence: Synthetic oligonucleotide
  Target: COL7A1; (+) strand; PAM type: YTN; PAM sequence: CTC
ggtcaccctgggaacagaag

SEQ ID NO: 29660 - DNA, 20 bp, Artificial Sequence
  Description of Artificial Sequence: Synthetic oligonucleotide
  Target: COL7A1; (+) strand; PAM type: YTN; PAM sequence: CTG
ggaacagaagaagcatgaga

SEQ ID NO: 29661 - DNA, 20 bp, Artificial Sequence
  Description of Artificial Sequence: Synthetic oligonucleotide
  Target: COL7A1; (+) strand; PAM type: YTN; PAM sequence: CTT
ctgccctgacctccctcagc

SEQ ID NO: 29662 - DNA, 20 bp, Artificial Sequence
  Description of Artificial Sequence: Synthetic oligonucleotide
  Target: COL7A1; (+) strand; PAM type: YTN; PAM sequence: TTC
tgccctgacctccctcagct

SEQ ID NO: 29663 - DNA, 20 bp, Artificial Sequence
  Description of Artificial Sequence: Synthetic oligonucleotide
  Target: COL7A1; (+) strand; PAM type: YTN; PAM sequence: CTG
ccctgacctccctcagctct

SEQ ID NO: 29664 - DNA, 20 bp, Artificial Sequence
  Description of Artificial Sequence: Synthetic oligonucleotide
  Target: COL7A1; (+) strand; PAM type: YTN; PAM sequence: CTG
acctccctcagctctggaac

SEQ ID NO: 29665 - DNA, 20 bp, Artificial Sequence
  Description of Artificial Sequence: Synthetic oligonucleotide
  Target: COL7A1; (+) strand; PAM type: YTN; PAM sequence: CTC
cctcagctctggaacctccc

SEQ ID NO: 29666 - DNA, 20 bp, Artificial Sequence
  Description of Artificial Sequence: Synthetic oligonucleotide
  Target: COL7A1; (+) strand; PAM type: YTN; PAM sequence: CTC
agctctggaacctccctgaa

SEQ ID NO: 29667 - DNA, 20 bp, Artificial Sequence
  Description of Artificial Sequence: Synthetic oligonucleotide
  Target: COL7A1; (+) strand; PAM type: YTN; PAM sequence: CTC
tggaacctccctgaactccc

SEQ ID NO: 29668 - DNA, 20 bp, Artificial Sequence
  Description of Artificial Sequence: Synthetic oligonucleotide
  Target: COL7A1; (+) strand; PAM type: YTN; PAM sequence: CTG
gaacctccctgaactcccat

SEQ ID NO: 29669 - DNA, 20 bp, Artificial Sequence
  Description of Artificial Sequence: Synthetic oligonucleotide
  Target: COL7A1; (+) strand; PAM type: YTN; PAM sequence: CTC
cctgaactcccatgagctcc

SEQ ID NO: 29670 - DNA, 20 bp, Artificial Sequence
  Description of Artificial Sequence: Synthetic oligonucleotide
  Target: COL7A1; (+) strand; PAM type: YTN; PAM sequence: CTG
aactcccatgagctccctgg

SEQ ID NO: 29671 - DNA, 20 bp, Artificial Sequence
  Description of Artificial Sequence: Synthetic oligonucleotide
  Target: COL7A1; (+) strand; PAM type: YTN; PAM sequence: CTC
ccatgagctccctggcctaa

SEQ ID NO: 29672 - DNA, 20 bp, Artificial Sequence
  Description of Artificial Sequence: Synthetic oligonucleotide
  Target: COL7A1; (+) strand; PAM type: YTN; PAM sequence: CTC
cctggcctaatgcccaaacc

SEQ ID NO: 29673 - DNA, 20 bp, Artificial Sequence
  Description of Artificial Sequence: Synthetic oligonucleotide
  Target: COL7A1; (+) strand; PAM type: YTN; PAM sequence: CTG
gcctaatgcccaaaccttct

SEQ ID NO: 29674 - DNA, 20 bp, Artificial Sequence
  Description of Artificial Sequence: Synthetic oligonucleotide
  Target: COL7A1; (+) strand; PAM type: YTN; PAM sequence: CTA
atgcccaaaccttctgtaac

SEQ ID NO: 29675 - DNA, 20 bp, Artificial Sequence
  Description of Artificial Sequence: Synthetic oligonucleotide
  Target: COL7A1; (+) strand; PAM type: YTN; PAM sequence: CTT
ctgtaacccaagcacctgtg

SEQ ID NO: 29676 - DNA, 20 bp, Artificial Sequence
  Description of Artificial Sequence: Synthetic oligonucleotide
  Target: COL7A1; (+) strand; PAM type: YTN; PAM sequence: TTC
tgtaacccaagcacctgtga

SEQ ID NO: 29677 - DNA, 20 bp, Artificial Sequence
  Description of Artificial Sequence: Synthetic oligonucleotide
  Target: COL7A1; (+) strand; PAM type: YTN; PAM sequence: CTG
taacccaagcacctgtgagc

SEQ ID NO: 29678 - DNA, 20 bp, Artificial Sequence
  Description of Artificial Sequence: Synthetic oligonucleotide
  Target: COL7A1; (+) strand; PAM type: YTN; PAM sequence: CTG
tgagccaaccagatgtgatc

SEQ ID NO: 29679 - DNA, 20 bp, Artificial Sequence
  Description of Artificial Sequence: Synthetic oligonucleotide
  Target: COL7A1; (+) strand; PAM type: YTN; PAM sequence: CTC
caactccactatagccccct

SEQ ID NO: 29680 - DNA, 20 bp, Artificial Sequence
  Description of Artificial Sequence: Synthetic oligonucleotide
  Target: COL7A1; (+) strand; PAM type: YTN; PAM sequence: CTC
cactatagccccctgccctg

SEQ ID NO: 29681 - DNA, 20 bp, Artificial Sequence
  Description of Artificial Sequence: Synthetic oligonucleotide
  Target: COL7A1; (+) strand; PAM type: YTN; PAM sequence: CTA
tagccccctgccctgatgca

SEQ ID NO: 29682 - DNA, 20 bp, Artificial Sequence
  Description of Artificial Sequence: Synthetic oligonucleotide
  Target: COL7A1; (+) strand; PAM type: YTN; PAM sequence: CTG
ccctgatgcacatgccccct

SEQ ID NO: 29683 - DNA, 20 bp, Artificial Sequence
  Description of Artificial Sequence: Synthetic oligonucleotide
  Target: COL7A1; (+) strand; PAM type: YTN; PAM sequence: CTG
atgcacatgccccctccacc

SEQ ID NO: 29684 - DNA, 20 bp, Artificial Sequence
  Description of Artificial Sequence: Synthetic oligonucleotide
  Target: COL7A1; (+) strand; PAM type: YTN; PAM sequence: CTC
cacctcccatgctttcatcc

SEQ ID NO: 29685 - DNA, 20 bp, Artificial Sequence
  Description of Artificial Sequence: Synthetic oligonucleotide
  Target: COL7A1; (+) strand; PAM type: YTN; PAM sequence: CTC
ccatgctttcatcctaactc

SEQ ID NO: 29686 - DNA, 20 bp, Artificial Sequence
  Description of Artificial Sequence: Synthetic oligonucleotide
  Target: COL7A1; (+) strand; PAM type: YTN; PAM sequence: CTT
tcatcctaactccactgtga

SEQ ID NO: 29687 - DNA, 20 bp, Artificial Sequence
  Description of Artificial Sequence: Synthetic oligonucleotide
  Target: COL7A1; (+) strand; PAM type: YTN; PAM sequence: TTT
catcctaactccactgtgac

SEQ ID NO: 29688 - DNA, 20 bp, Artificial Sequence
  Description of Artificial Sequence: Synthetic oligonucleotide
  Target: COL7A1; (+) strand; PAM type: YTN; PAM sequence: TTC
atcctaactccactgtgacc

SEQ ID NO: 29689 - DNA, 20 bp, Artificial Sequence
  Description of Artificial Sequence: Synthetic oligonucleotide
  Target: COL7A1; (+) strand; PAM type: YTN; PAM sequence: CTA
actccactgtgaccccaacc

SEQ ID NO: 29690 - DNA, 20 bp, Artificial Sequence
  Description of Artificial Sequence: Synthetic oligonucleotide
  Target: COL7A1; (+) strand; PAM type: YTN; PAM sequence: CTC
cactgtgaccccaacccacc

SEQ ID NO: 29691 - DNA, 20 bp, Artificial Sequence
  Description of Artificial Sequence: Synthetic oligonucleotide
  Target: COL7A1; (+) strand; PAM type: YTN; PAM sequence: CTG
tgaccccaacccaccttgac

SEQ ID NO: 29692 - DNA, 20 bp, Artificial Sequence
  Description of Artificial Sequence: Synthetic oligonucleotide
  Target: COL7A1; (+) strand; PAM type: YTN; PAM sequence: CTT
gacacctcgagaccagcccc

SEQ ID NO: 29693 - DNA, 20 bp, Artificial Sequence
  Description of Artificial Sequence: Synthetic oligonucleotide
  Target: COL7A1; (+) strand; PAM type: YTN; PAM sequence: TTG
acacctcgagaccagcccca

SEQ ID NO: 29694 - DNA, 20 bp, Artificial Sequence
  Description of Artificial Sequence: Synthetic oligonucleotide
  Target: COL7A1; (+) strand; PAM type: YTN; PAM sequence: CTC
gagaccagccccacttcagc

SEQ ID NO: 29695 - DNA, 20 bp, Artificial Sequence
  Description of Artificial Sequence: Synthetic oligonucleotide
  Target: COL7A1; (+) strand; PAM type: YTN; PAM sequence: CTT
cagcccccaaagtcccaacc

SEQ ID NO: 29696 - DNA, 20 bp, Artificial Sequence
  Description of Artificial Sequence: Synthetic oligonucleotide
  Target: COL7A1; (+) strand; PAM type: YTN; PAM sequence: TTC
agcccccaaagtcccaaccc

SEQ ID NO: 29697 - DNA, 20 bp, Artificial Sequence
  Description of Artificial Sequence: Synthetic oligonucleotide
  Target: COL7A1; (+) strand; PAM type: YTN; PAM sequence: CTC
tacagccttccttgtcccta

SEQ ID NO: 29698 - DNA, 20 bp, Artificial Sequence
  Description of Artificial Sequence: Synthetic oligonucleotide
  Target: COL7A1; (+) strand; PAM type: YTN; PAM sequence: CTA
cagccttccttgtccctaca

SEQ ID NO: 29699 - DNA, 20 bp, Artificial Sequence
  Description of Artificial Sequence: Synthetic oligonucleotide
  Target: COL7A1; (+) strand; PAM type: YTN; PAM sequence: CTT
ccttgtccctacacccccat

SEQ ID NO: 29700 - DNA, 20 bp, Artificial Sequence
  Description of Artificial Sequence: Synthetic oligonucleotide
  Target: COL7A1; (+) strand; PAM type: YTN; PAM sequence: TTC
cttgtccctacacccccatg

SEQ ID NO: 29701 - DNA, 20 bp, Artificial Sequence
  Description of Artificial Sequence: Synthetic oligonucleotide
  Target: COL7A1; (+) strand; PAM type: YTN; PAM sequence: CTT
gtccctacacccccatgacc

SEQ ID NO: 29702 - DNA, 20 bp, Artificial Sequence
  Description of Artificial Sequence: Synthetic oligonucleotide
  Target: COL7A1; (+) strand; PAM type: YTN; PAM sequence: TTG
tccctacacccccatgaccc

SEQ ID NO: 29703 - DNA, 20 bp, Artificial Sequence
  Description of Artificial Sequence: Synthetic oligonucleotide
  Target: COL7A1; (+) strand; PAM type: YTN; PAM sequence: CTA
cacccccatgacccgaccat

SEQ ID NO: 29704 - DNA, 20 bp, Artificial Sequence
  Description of Artificial Sequence: Synthetic oligonucleotide
  Target: COL7A1; (+) strand; PAM type: YTN; PAM sequence: CTT
ccctgccccatcctgactcc

SEQ ID NO: 29705 - DNA, 20 bp, Artificial Sequence
  Description of Artificial Sequence: Synthetic oligonucleotide
  Target: COL7A1; (+) strand; PAM type: YTN; PAM sequence: TTC
cctgccccatcctgactccc

SEQ ID NO: 29706 - DNA, 20 bp, Artificial Sequence
  Description of Artificial Sequence: Synthetic oligonucleotide
  Target: COL7A1; (+) strand; PAM type: YTN; PAM sequence: CTG
ccccatcctgactccctgtc

SEQ ID NO: 29707 - DNA, 20 bp, Artificial Sequence
  Description of Artificial Sequence: Synthetic oligonucleotide
  Target: COL7A1; (+) strand; PAM type: YTN; PAM sequence: CTG
actccctgtcatgtccactg

SEQ ID NO: 29708 - DNA, 20 bp, Artificial Sequence
  Description of Artificial Sequence: Synthetic oligonucleotide
  Target: COL7A1; (+) strand; PAM type: YTN; PAM sequence: CTC
cctgtcatgtccactgtcca

SEQ ID NO: 29709 - DNA, 20 bp, Artificial Sequence
  Description of Artificial Sequence: Synthetic oligonucleotide
  Target: COL7A1; (+) strand; PAM type: YTN; PAM sequence: CTG
tcatgtccactgtccacaga

SEQ ID NO: 29710 - DNA, 20 bp, Artificial Sequence
  Description of Artificial Sequence: Synthetic oligonucleotide
  Target: COL7A1; (+) strand; PAM type: YTN; PAM sequence: CTG
tccacagaccctgtaccttg

SEQ ID NO: 29711 - DNA, 20 bp, Artificial Sequence
  Description of Artificial Sequence: Synthetic oligonucleotide
  Target: COL7A1; (+) strand; PAM type: YTN; PAM sequence: CTG
taccttgggaccgatcaggc

SEQ ID NO: 29712 - DNA, 20 bp, Artificial Sequence
  Description of Artificial Sequence: Synthetic oligonucleotide
  Target: COL7A1; (+) strand; PAM type: YTN; PAM sequence: CTT
gggaccgatcaggccctcct

SEQ ID NO: 29713 - DNA, 20 bp, Artificial Sequence
  Description of Artificial Sequence: Synthetic oligonucleotide
  Target: COL7A1; (+) strand; PAM type: YTN; PAM sequence: TTG
ggaccgatcaggccctcctt

SEQ ID NO: 29714 - DNA, 20 bp, Artificial Sequence
  Description of Artificial Sequence: Synthetic oligonucleotide
  Target: COL7A1; (+) strand; PAM type: YTN; PAM sequence: CTC
cttgccaggggcccccgact

SEQ ID NO: 29715 - DNA, 20 bp, Artificial Sequence
  Description of Artificial Sequence: Synthetic oligonucleotide
  Target: COL7A1; (+) strand; PAM type: YTN; PAM sequence: CTT
gccaggggcccccgactggc

SEQ ID NO: 29716 - DNA, 20 bp, Artificial Sequence
  Description of Artificial Sequence: Synthetic oligonucleotide
  Target: COL7A1; (+) strand; PAM type: YTN; PAM sequence: TTG
ccaggggcccccgactggcc

SEQ ID NO: 29717 - DNA, 20 bp, Artificial Sequence
  Description of Artificial Sequence: Synthetic oligonucleotide
  Target: COL7A1; (+) strand; PAM type: YTN; PAM sequence: CTG
gcccggcacaccaggctccc

SEQ ID NO: 29718 - DNA, 20 bp, Artificial Sequence
  Description of Artificial Sequence: Synthetic oligonucleotide
  Target: COL7A1; (+) strand; PAM type: YTN; PAM sequence: CTC
cccctggagaaaaaaagaca

SEQ ID NO: 29719 - DNA, 20 bp, Artificial Sequence
  Description of Artificial Sequence: Synthetic oligonucleotide
  Target: COL7A1; (+) strand; PAM type: YTN; PAM sequence: CTG
gagaaaaaaagacatgaact

SEQ ID NO: 29720 - DNA, 20 bp, Artificial Sequence
  Description of Artificial Sequence: Synthetic oligonucleotide
  Target: COL7A1; (+) strand; PAM type: YTN; PAM sequence: CTT
ggcccccgtccacccgtggc

SEQ ID NO: 29721 - DNA, 20 bp, Artificial Sequence
  Description of Artificial Sequence: Synthetic oligonucleotide
  Target: COL7A1; (+) strand; PAM type: YTN; PAM sequence: TTG
gcccccgtccacccgtggcc

SEQ ID NO: 29722 - DNA, 20 bp, Artificial Sequence
  Description of Artificial Sequence: Synthetic oligonucleotide
  Target: COL7A1; (+) strand; PAM type: YTN; PAM sequence: CTC
attctgagcgtgcccacact

SEQ ID NO: 29723 - DNA, 20 bp, Artificial Sequence
  Description of Artificial Sequence: Synthetic oligonucleotide
  Target: COL7A1; (+) strand; PAM type: YTN; PAM sequence: TTC
tgagcgtgcccacactcacc

SEQ ID NO: 29724 - DNA, 20 bp, Artificial Sequence
  Description of Artificial Sequence: Synthetic oligonucleotide
  Target: COL7A1; (+) strand; PAM type: YTN; PAM sequence: CTG
agcgtgcccacactcaccat

SEQ ID NO: 29725 - DNA, 20 bp, Artificial Sequence
  Description of Artificial Sequence: Synthetic oligonucleotide
  Target: COL7A1; (+) strand; PAM type: YTN; PAM sequence: CTC
accatctctcctttgtgtcc

SEQ ID NO: 29726 - DNA, 20 bp, Artificial Sequence
  Description of Artificial Sequence: Synthetic oligonucleotide
  Target: COL7A1; (+) strand; PAM type: YTN; PAM sequence: CTC
tcctttgtgtcctgccagcc

SEQ ID NO: 29727 - DNA, 20 bp, Artificial Sequence
  Description of Artificial Sequence: Synthetic oligonucleotide
  Target: COL7A1; (+) strand; PAM type: YTN; PAM sequence: CTC
ctttgtgtcctgccagcccg

SEQ ID NO: 29728 - DNA, 20 bp, Artificial Sequence
  Description of Artificial Sequence: Synthetic oligonucleotide
  Target: COL7A1; (+) strand; PAM type: YTN; PAM sequence: CTT
tgtgtcctgccagcccgggg

SEQ ID NO: 29729 - DNA, 20 bp, Artificial Sequence
  Description of Artificial Sequence: Synthetic oligonucleotide
  Target: COL7A1; (+) strand; PAM type: YTN; PAM sequence: TTT
gtgtcctgccagcccggggc

SEQ ID NO: 29730 - DNA, 20 bp, Artificial Sequence
  Description of Artificial Sequence: Synthetic oligonucleotide
  Target: COL7A1; (+) strand; PAM type: YTN; PAM sequence: TTG
tgtcctgccagcccggggcg

SEQ ID NO: 29731 - DNA, 20 bp, Artificial Sequence
  Description of Artificial Sequence: Synthetic oligonucleotide
  Target: COL7A1; (+) strand; PAM type: YTN; PAM sequence: CTG
ccagcccggggcggcctggg

SEQ ID NO: 29732 - DNA, 20 bp, Artificial Sequence
  Description of Artificial Sequence: Synthetic oligonucleotide
  Target: COL7A1; (+) strand; PAM type: YTN; PAM sequence: CTG
ggggaccagcttctccctgc

SEQ ID NO: 29733 - DNA, 20 bp, Artificial Sequence
  Description of Artificial Sequence: Synthetic oligonucleotide
  Target: COL7A1; (+) strand; PAM type: YTN; PAM sequence: CTT
ctccctgcaggcatcaggca

SEQ ID NO: 29734 - DNA, 20 bp, Artificial Sequence
  Description of Artificial Sequence: Synthetic oligonucleotide
  Target: COL7A1; (+) strand; PAM type: YTN; PAM sequence: TTC
tccctgcaggcatcaggcag

SEQ ID NO: 29735 - DNA, 20 bp, Artificial Sequence
  Description of Artificial Sequence: Synthetic oligonucleotide
  Target: COL7A1; (+) strand; PAM type: YTN; PAM sequence: CTC
cctgcaggcatcaggcagtg

SEQ ID NO: 29736 - DNA, 20 bp, Artificial Sequence
  Description of Artificial Sequence: Synthetic oligonucleotide
  Target: COL7A1; (+) strand; PAM type: YTN; PAM sequence: CTG
caggcatcaggcagtggggt

SEQ ID NO: 29737 - DNA, 20 bp, Artificial Sequence
  Description of Artificial Sequence: Synthetic oligonucleotide
  Target: COL7A1; (+) strand; PAM type: YTN; PAM sequence: CTT
aggccccaggccacgtagcc

SEQ ID NO: 29738 - DNA, 20 bp, Artificial Sequence
  Description of Artificial Sequence: Synthetic oligonucleotide
  Target: COL7A1; (+) strand; PAM type: YTN; PAM sequence: TTA
ggccccaggccacgtagccc

SEQ ID NO: 29739 - DNA, 20 bp, Artificial Sequence
  Description of Artificial Sequence: Synthetic oligonucleotide
  Target: COL7A1; (+) strand; PAM type: YTN; PAM sequence: CTC
tgtaccttgtctcccttctc

SEQ ID NO: 29740 - DNA, 20 bp, Artificial Sequence
  Description of Artificial Sequence: Synthetic oligonucleotide
  Target: COL7A1; (+) strand; PAM type: YTN; PAM sequence: CTG
taccttgtctcccttctctc

SEQ ID NO: 29741 - DNA, 20 bp, Artificial Sequence
  Description of Artificial Sequence: Synthetic oligonucleotide
  Target: COL7A1; (+) strand; PAM type: YTN; PAM sequence: CTT
gtctcccttctctccatcaa

SEQ ID NO: 29742 - DNA, 20 bp, Artificial Sequence
  Description of Artificial Sequence: Synthetic oligonucleotide
  Target: COL7A1; (+) strand; PAM type: YTN; PAM sequence: TTG
tctcccttctctccatcaag

SEQ ID NO: 29743 - DNA, 20 bp, Artificial Sequence
  Description of Artificial Sequence: Synthetic oligonucleotide
  Target: COL7A1; (+) strand; PAM type: YTN; PAM sequence: CTC
ccttctctccatcaaggcca

SEQ ID NO: 29744 - DNA, 20 bp, Artificial Sequence
  Description of Artificial Sequence: Synthetic oligonucleotide
  Target: COL7A1; (+) strand; PAM type: YTN; PAM sequence: CTT
ctctccatcaaggccacagg

SEQ ID NO: 29745 - DNA, 20 bp, Artificial Sequence
  Description of Artificial Sequence: Synthetic oligonucleotide
  Target: COL7A1; (+) strand; PAM type: YTN; PAM sequence: TTC
tctccatcaaggccacaggc

SEQ ID NO: 29746 - DNA, 20 bp, Artificial Sequence
  Description of Artificial Sequence: Synthetic oligonucleotide
  Target: COL7A1; (+) strand; PAM type: YTN; PAM sequence: CTC
tccatcaaggccacaggctc

SEQ ID NO: 29747 - DNA, 20 bp, Artificial Sequence
  Description of Artificial Sequence: Synthetic oligonucleotide
  Target: COL7A1; (+) strand; PAM type: YTN; PAM sequence: CTC
catcaaggccacaggctccc

SEQ ID NO: 29748 - DNA, 20 bp, Artificial Sequence
  Description of Artificial Sequence: Synthetic oligonucleotide
  Target: COL7A1; (+) strand; PAM type: YTN; PAM sequence: CTC
ccttcactccccgttcaccc

SEQ ID NO: 29749 - DNA, 20 bp, Artificial Sequence
  Description of Artificial Sequence: Synthetic oligonucleotide
  Target: COL7A1; (+) strand; PAM type: YTN; PAM sequence: CTT
cactccccgttcaccctgag

SEQ ID NO: 29750 - DNA, 20 bp, Artificial Sequence
  Description of Artificial Sequence: Synthetic oligonucleotide
  Target: COL7A1; (+) strand; PAM type: YTN; PAM sequence: TTC
actccccgttcaccctgagg

SEQ ID NO: 29751 - DNA, 20 bp, Artificial Sequence
  Description of Artificial Sequence: Synthetic oligonucleotide
  Target: COL7A1; (+) strand; PAM type: YTN; PAM sequence: CTC
cccgttcaccctgagggaga

SEQ ID NO: 29752 - DNA, 20 bp, Artificial Sequence
  Description of Artificial Sequence: Synthetic oligonucleotide
  Target: COL7A1; (+) strand; PAM type: YTN; PAM sequence: TTC
accctgagggagaaaagcag

SEQ ID NO: 29753 - DNA, 20 bp, Artificial Sequence
  Description of Artificial Sequence: Synthetic oligonucleotide
  Target: COL7A1; (+) strand; PAM type: YTN; PAM sequence: CTG
agggagaaaagcagatgaag

SEQ ID NO: 29754 - DNA, 20 bp, Artificial Sequence
  Description of Artificial Sequence: Synthetic oligonucleotide
  Target: COL7A1; (+) strand; PAM type: YTN; PAM sequence: TTC
ccagacacctcactctgtga

SEQ ID NO: 29755 - DNA, 20 bp, Artificial Sequence
  Description of Artificial Sequence: Synthetic oligonucleotide
  Target: COL7A1; (+) strand; PAM type: YTN; PAM sequence: CTC
actctgtgacccccttcacc

SEQ ID NO: 29756 - DNA, 20 bp, Artificial Sequence
  Description of Artificial Sequence: Synthetic oligonucleotide
  Target: COL7A1; (+) strand; PAM type: YTN; PAM sequence: CTC
tgtgacccccttcaccctga

SEQ ID NO: 29757 - DNA, 20 bp, Artificial Sequence
  Description of Artificial Sequence: Synthetic oligonucleotide
  Target: COL7A1; (+) strand; PAM type: YTN; PAM sequence: CTG
tgacccccttcaccctgaaa

SEQ ID NO: 29758 - DNA, 20 bp, Artificial Sequence
  Description of Artificial Sequence: Synthetic oligonucleotide
  Target: COL7A1; (+) strand; PAM type: YTN; PAM sequence: CTT
caccctgaaactaactctcc

SEQ ID NO: 29759 - DNA, 20 bp, Artificial Sequence
  Description of Artificial Sequence: Synthetic oligonucleotide
  Target: COL7A1; (+) strand; PAM type: YTN; PAM sequence: TTC
accctgaaactaactctcca

SEQ ID NO: 29760 - DNA, 20 bp, Artificial Sequence
  Description of Artificial Sequence: Synthetic oligonucleotide
  Target: COL7A1; (+) strand; PAM type: YTN; PAM sequence: CTG
aaactaactctccaaacagg

SEQ ID NO: 29761 - DNA, 20 bp, Artificial Sequence
  Description of Artificial Sequence: Synthetic oligonucleotide
  Target: COL7A1; (+) strand; PAM type: YTN; PAM sequence: CTA
actctccaaacaggcctcag

SEQ ID NO: 29762 - DNA, 20 bp, Artificial Sequence
  Description of Artificial Sequence: Synthetic oligonucleotide
  Target: COL7A1; (+) strand; PAM type: YTN; PAM sequence: CTC
tccaaacaggcctcagctac

SEQ ID NO: 29763 - DNA, 20 bp, Artificial Sequence
  Description of Artificial Sequence: Synthetic oligonucleotide
  Target: COL7A1; (+) strand; PAM type: YTN; PAM sequence: CTC
caaacaggcctcagctactc

SEQ ID NO: 29764 - DNA, 20 bp, Artificial Sequence
  Description of Artificial Sequence: Synthetic oligonucleotide
  Target: COL7A1; (+) strand; PAM type: YTN; PAM sequence: CTC
agctactccaacctctgacc

SEQ ID NO: 29765 - DNA, 20 bp, Artificial Sequence
  Description of Artificial Sequence: Synthetic oligonucleotide
  Target: COL7A1; (+) strand; PAM type: YTN; PAM sequence: CTA
ctccaacctctgacccagtg

SEQ ID NO: 29766 - DNA, 20 bp, Artificial Sequence
  Description of Artificial Sequence: Synthetic oligonucleotide
  Target: COL7A1; (+) strand; PAM type: YTN; PAM sequence: CTC
caacctctgacccagtgccc

SEQ ID NO: 29767 - DNA, 20 bp, Artificial Sequence
  Description of Artificial Sequence: Synthetic oligonucleotide
  Target: COL7A1; (+) strand; PAM type: YTN; PAM sequence: CTC
tgacccagtgccctaatatc

SEQ ID NO: 29768 - DNA, 20 bp, Artificial Sequence
  Description of Artificial Sequence: Synthetic oligonucleotide
  Target: COL7A1; (+) strand; PAM type: YTN; PAM sequence: CTG
acccagtgccctaatatctg

SEQ ID NO: 29769 - DNA, 20 bp, Artificial Sequence
  Description of Artificial Sequence: Synthetic oligonucleotide
  Target: COL7A1; (+) strand; PAM type: YTN; PAM sequence: CTA
atatctgaccccaggtccct

SEQ ID NO: 29770 - DNA, 20 bp, Artificial Sequence
  Description of Artificial Sequence: Synthetic oligonucleotide
  Target: COL7A1; (+) strand; PAM type: YTN; PAM sequence: CTG
accccaggtccctcgccctt

SEQ ID NO: 29771 - DNA, 20 bp, Artificial Sequence
  Description of Artificial Sequence: Synthetic oligonucleotide
  Target: COL7A1; (+) strand; PAM type: YTN; PAM sequence: CTC
gcccttcaacattaggcctt

SEQ ID NO: 29772 - DNA, 20 bp, Artificial Sequence
  Description of Artificial Sequence: Synthetic oligonucleotide
  Target: COL7A1; (+) strand; PAM type: YTN; PAM sequence: CTT
caacattaggccttcctgac

SEQ ID NO: 29773 - DNA, 20 bp, Artificial Sequence
  Description of Artificial Sequence: Synthetic oligonucleotide
  Target: COL7A1; (+) strand; PAM type: YTN; PAM sequence: TTC
aacattaggccttcctgacc

SEQ ID NO: 29774 - DNA, 20 bp, Artificial Sequence
  Description of Artificial Sequence: Synthetic oligonucleotide
  Target: COL7A1; (+) strand; PAM type: YTN; PAM sequence: TTA
ggccttcctgaccagaaaaa

SEQ ID NO: 29775 - DNA, 20 bp, Artificial Sequence
  Description of Artificial Sequence: Synthetic oligonucleotide
  Target: COL7A1; (+) strand; PAM type: YTN; PAM sequence: CTT
cctgaccagaaaaaaaccaa

SEQ ID NO: 29776 - DNA, 20 bp, Artificial Sequence
  Description of Artificial Sequence: Synthetic oligonucleotide
  Target: COL7A1; (+) strand; PAM type: YTN; PAM sequence: TTC
ctgaccagaaaaaaaccaat

SEQ ID NO: 29777 - DNA, 20 bp, Artificial Sequence
  Description of Artificial Sequence: Synthetic oligonucleotide
  Target: COL7A1; (+) strand; PAM type: YTN; PAM sequence: CTG
accagaaaaaaaccaatctt

SEQ ID NO: 29778 - DNA, 20 bp, Artificial Sequence
  Description of Artificial Sequence: Synthetic oligonucleotide
  Target: COL7A1; (+) strand; PAM type: YTN; PAM sequence: CTT
gtttctttcctaccttgagg

SEQ ID NO: 29779 - DNA, 20 bp, Artificial Sequence
  Description of Artificial Sequence: Synthetic oligonucleotide
  Target: COL7A1; (+) strand; PAM type: YTN; PAM sequence: TTG
tttctttcctaccttgaggc

SEQ ID NO: 29780 - DNA, 20 bp, Artificial Sequence
  Description of Artificial Sequence: Synthetic oligonucleotide
  Target: COL7A1; (+) strand; PAM type: YTN; PAM sequence: TTT
ctttcctaccttgaggcccc

SEQ ID NO: 29781 - DNA, 20 bp, Artificial Sequence
  Description of Artificial Sequence: Synthetic oligonucleotide
  Target: COL7A1; (+) strand; PAM type: YTN; PAM sequence: TTC
tttcctaccttgaggccccg

SEQ ID NO: 29782 - DNA, 20 bp, Artificial Sequence
  Description of Artificial Sequence: Synthetic oligonucleotide
  Target: COL7A1; (+) strand; PAM type: YTN; PAM sequence: CTT
tcctaccttgaggccccggg

SEQ ID NO: 29783 - DNA, 20 bp, Artificial Sequence
  Description of Artificial Sequence: Synthetic oligonucleotide
  Target: COL7A1; (+) strand; PAM type: YTN; PAM sequence: TTT
cctaccttgaggccccgggg

SEQ ID NO: 29784 - DNA, 20 bp, Artificial Sequence
  Description of Artificial Sequence: Synthetic oligonucleotide
  Target: COL7A1; (+) strand; PAM type: YTN; PAM sequence: TTC
ctaccttgaggccccgggga

SEQ ID NO: 29785 - DNA, 20 bp, Artificial Sequence
  Description of Artificial Sequence: Synthetic oligonucleotide
  Target: COL7A1; (+) strand; PAM type: YTN; PAM sequence: CTA
ccttgaggccccggggaccc

SEQ ID NO: 29786 - DNA, 20 bp, Artificial Sequence
  Description of Artificial Sequence: Synthetic oligonucleotide
  Target: COL7A1; (+) strand; PAM type: YTN; PAM sequence: CTT
gaggccccggggacccatga

SEQ ID NO: 29787 - DNA, 20 bp, Artificial Sequence
  Description of Artificial Sequence: Synthetic oligonucleotide
  Target: COL7A1; (+) strand; PAM type: YTN; PAM sequence: TTG
aggccccggggacccatgaa

SEQ ID NO: 29788 - DNA, 20 bp, Artificial Sequence
  Description of Artificial Sequence: Synthetic oligonucleotide
  Target: COL7A1; (+) strand; PAM type: YTN; PAM sequence: CTC
ctttttctcctcggatacca

SEQ ID NO: 29789 - DNA, 20 bp, Artificial Sequence
  Description of Artificial Sequence: Synthetic oligonucleotide
  Target: COL7A1; (+) strand; PAM type: YTN; PAM sequence: CTT
tttctcctcggataccaggc

SEQ ID NO: 29790 - DNA, 20 bp, Artificial Sequence
  Description of Artificial Sequence: Synthetic oligonucleotide
  Target: COL7A1; (+) strand; PAM type: YTN; PAM sequence: TTT
ttctcctcggataccaggca

SEQ ID NO: 29791 - DNA, 20 bp, Artificial Sequence
  Description of Artificial Sequence: Synthetic oligonucleotide
  Target: COL7A1; (+) strand; PAM type: YTN; PAM sequence: TTT
tctcctcggataccaggcac

SEQ ID NO: 29792 - DNA, 20 bp, Artificial Sequence
  Description of Artificial Sequence: Synthetic oligonucleotide
  Target: COL7A1; (+) strand; PAM type: YTN; PAM sequence: TTT
ctcctcggataccaggcact

SEQ ID NO: 29793 - DNA, 20 bp, Artificial Sequence
  Description of Artificial Sequence: Synthetic oligonucleotide
  Target: COL7A1; (+) strand; PAM type: YTN; PAM sequence: TTC
tcctcggataccaggcactc

SEQ ID NO: 29794 - DNA, 20 bp, Artificial Sequence
  Description of Artificial Sequence: Synthetic oligonucleotide
  Target: COL7A1; (+) strand; PAM type: YTN; PAM sequence: CTC
ctcggataccaggcactcca

SEQ ID NO: 29795 - DNA, 20 bp, Artificial Sequence
  Description of Artificial Sequence: Synthetic oligonucleotide
  Target: COL7A1; (+) strand; PAM type: YTN; PAM sequence: CTC
ggataccaggcactccatcc

SEQ ID NO: 29796 - DNA, 20 bp, Artificial Sequence
  Description of Artificial Sequence: Synthetic oligonucleotide
  Target: COL7A1; (+) strand; PAM type: YTN; PAM sequence: CTC
catcctttcctggggatccc

SEQ ID NO: 29797 - DNA, 20 bp, Artificial Sequence
  Description of Artificial Sequence: Synthetic oligonucleotide
  Target: COL7A1; (+) strand; PAM type: YTN; PAM sequence: CTT
tcctggggatccctagcagg

SEQ ID NO: 29798 - DNA, 20 bp, Artificial Sequence
  Description of Artificial Sequence: Synthetic oligonucleotide
  Target: COL7A1; (+) strand; PAM type: YTN; PAM sequence: TTT
cctggggatccctagcaggg

SEQ ID NO: 29799 - DNA, 20 bp, Artificial Sequence
  Description of Artificial Sequence: Synthetic oligonucleotide
  Target: COL7A1; (+) strand; PAM type: YTN; PAM sequence: TTC
ctggggatccctagcaggga

SEQ ID NO: 29800 - DNA, 20 bp, Artificial Sequence
  Description of Artificial Sequence: Synthetic oligonucleotide
  Target: COL7A1; (+) strand; PAM type: YTN; PAM sequence: CTG
gggatccctagcagggagag

SEQ ID NO: 29801 - DNA, 20 bp, Artificial Sequence
  Description of Artificial Sequence: Synthetic oligonucleotide
  Target: COL7A1; (+) strand; PAM type: YTN; PAM sequence: CTA
gcagggagagggtccatgtg

SEQ ID NO: 29802 - DNA, 20 bp, Artificial Sequence
  Description of Artificial Sequence: Synthetic oligonucleotide
  Target: COL7A1; (+) strand; PAM type: YTN; PAM sequence: CTG
gatagtgggtagggaacacc

SEQ ID NO: 29803 - DNA, 20 bp, Artificial Sequence
  Description of Artificial Sequence: Synthetic oligonucleotide
  Target: COL7A1; (+) strand; PAM type: YTN; PAM sequence: CTC
tggaggccagagccactggg

SEQ ID NO: 29804 - DNA, 20 bp, Artificial Sequence
  Description of Artificial Sequence: Synthetic oligonucleotide
  Target: COL7A1; (+) strand; PAM type: YTN; PAM sequence: CTG
gaggccagagccactggggc

SEQ ID NO: 29805 - DNA, 20 bp, Artificial Sequence
  Description of Artificial Sequence: Synthetic oligonucleotide
  Target: COL7A1; (+) strand; PAM type: YTN; PAM sequence: CTG
gggcttgccatggggacaag

SEQ ID NO: 29806 - DNA, 20 bp, Artificial Sequence
  Description of Artificial Sequence: Synthetic oligonucleotide
  Target: COL7A1; (+) strand; PAM type: YTN; PAM sequence: CTT
gccatggggacaagggtcac

SEQ ID NO: 29807 - DNA, 20 bp, Artificial Sequence
  Description of Artificial Sequence: Synthetic oligonucleotide
  Target: COL7A1; (+) strand; PAM type: YTN; PAM sequence: TTG
ccatggggacaagggtcacc

SEQ ID NO: 29808 - DNA, 20 bp, Artificial Sequence
  Description of Artificial Sequence: Synthetic oligonucleotide
  Target: COL7A1; (+) strand; PAM type: YTN; PAM sequence: CTA
ctgtggaggtgggggaccct

SEQ ID NO: 29809 - DNA, 20 bp, Artificial Sequence
  Description of Artificial Sequence: Synthetic oligonucleotide
  Target: COL7A1; (+) strand; PAM type: YTN; PAM sequence: CTG
tggaggtgggggaccctggg

SEQ ID NO: 29810 - DNA, 20 bp, Artificial Sequence
  Description of Artificial Sequence: Synthetic oligonucleotide
  Target: COL7A1; (+) strand; PAM type: YTN; PAM sequence: CTG
ggtgacatgaggacaccatg

SEQ ID NO: 29811 - DNA, 20 bp, Artificial Sequence
  Description of Artificial Sequence: Synthetic oligonucleotide
  Target: COL7A1; (+) strand; PAM type: YTN; PAM sequence: CTG
ggtcactataaggtcaaaag

SEQ ID NO: 29812 - DNA, 20 bp, Artificial Sequence
  Description of Artificial Sequence: Synthetic oligonucleotide
  Target: COL7A1; (+) strand; PAM type: YTN; PAM sequence: CTA
taaggtcaaaagctaccaca

SEQ ID NO: 29813 - DNA, 20 bp, Artificial Sequence
  Description of Artificial Sequence: Synthetic oligonucleotide
  Target: COL7A1; (+) strand; PAM type: YTN; PAM sequence: CTA
ccacactggtgggaccacca

SEQ ID NO: 29814 - DNA, 20 bp, Artificial Sequence
  Description of Artificial Sequence: Synthetic oligonucleotide
  Target: COL7A1; (+) strand; PAM type: YTN; PAM sequence: CTG
gtgggaccaccatggtgacg

SEQ ID NO: 29815 - DNA, 20 bp, Artificial Sequence
  Description of Artificial Sequence: Synthetic oligonucleotide
  Target: COL7A1; (+) strand; PAM type: YTN; PAM sequence: CTC
tggggacagggggcccctgt

SEQ ID NO: 29816 - DNA, 20 bp, Artificial Sequence
  Description of Artificial Sequence: Synthetic oligonucleotide
  Target: COL7A1; (+) strand; PAM type: YTN; PAM sequence: CTG
gggacagggggcccctgtgg

SEQ ID NO: 29817 - DNA, 20 bp, Artificial Sequence
  Description of Artificial Sequence: Synthetic oligonucleotide
  Target: COL7A1; (+) strand; PAM type: YTN; PAM sequence: CTG
tgggagcaggggcatcttac

SEQ ID NO: 29818 - DNA, 20 bp, Artificial Sequence
  Description of Artificial Sequence: Synthetic oligonucleotide
  Target: COL7A1; (+) strand; PAM type: YTN; PAM sequence: CTT
accgggtcaccagggatccc

SEQ ID NO: 29819 - DNA, 20 bp, Artificial Sequence
  Description of Artificial Sequence: Synthetic oligonucleotide
  Target: COL7A1; (+) strand; PAM type: YTN; PAM sequence: TTA
ccgggtcaccagggatccct

SEQ ID NO: 29820 - DNA, 20 bp, Artificial Sequence
  Description of Artificial Sequence: Synthetic oligonucleotide
  Target: COL7A1; (+) strand; PAM type: YTN; PAM sequence: CTG
ctgcaccaggttgaccctgt

SEQ ID NO: 29821 - DNA, 20 bp, Artificial Sequence
  Description of Artificial Sequence: Synthetic oligonucleotide
  Target: COL7A1; (+) strand; PAM type: YTN; PAM sequence: CTG
caccaggttgaccctgtgag

SEQ ID NO: 29822 - DNA, 20 bp, Artificial Sequence
  Description of Artificial Sequence: Synthetic oligonucleotide
  Target: COL7A1; (+) strand; PAM type: YTN; PAM sequence: TTG
accctgtgagaaacacagat

SEQ ID NO: 29823 - DNA, 20 bp, Artificial Sequence
  Description of Artificial Sequence: Synthetic oligonucleotide
  Target: COL7A1; (+) strand; PAM type: YTN; PAM sequence: CTG
tgagaaacacagatggggga

SEQ ID NO: 29824 - DNA, 20 bp, Artificial Sequence
  Description of Artificial Sequence: Synthetic oligonucleotide
  Target: COL7A1; (+) strand; PAM type: YTN; PAM sequence: CTT
cagtgggactgtccccaaca

SEQ ID NO: 29825 - DNA, 20 bp, Artificial Sequence
  Description of Artificial Sequence: Synthetic oligonucleotide
  Target: COL7A1; (+) strand; PAM type: YTN; PAM sequence: TTC
agtgggactgtccccaacac

SEQ ID NO: 29826 - DNA, 20 bp, Artificial Sequence
  Description of Artificial Sequence: Synthetic oligonucleotide
  Target: COL7A1; (+) strand; PAM type: YTN; PAM sequence: CTG
tccccaacactggcccatcc

SEQ ID NO: 29827 - DNA, 20 bp, Artificial Sequence
  Description of Artificial Sequence: Synthetic oligonucleotide
  Target: COL7A1; (+) strand; PAM type: YTN; PAM sequence: CTG
gcccatccgctgcatgtgtg

SEQ ID NO: 29828 - DNA, 20 bp, Artificial Sequence
  Description of Artificial Sequence: Synthetic oligonucleotide
  Target: COL7A1; (+) strand; PAM type: YTN; PAM sequence: CTG
catgtgtggccactcagatg

SEQ ID NO: 29829 - DNA, 20 bp, Artificial Sequence
  Description of Artificial Sequence: Synthetic oligonucleotide
  Target: COL7A1; (+) strand; PAM type: YTN; PAM sequence: CTC
agatgctcagcggccagggc

SEQ ID NO: 29830 - DNA, 20 bp, Artificial Sequence
  Description of Artificial Sequence: Synthetic oligonucleotide
  Target: COL7A1; (+) strand; PAM type: YTN; PAM sequence: CTC
agcggccagggcccaggcca

SEQ ID NO: 29831 - DNA, 20 bp, Artificial Sequence
  Description of Artificial Sequence: Synthetic oligonucleotide
  Target: COL7A1; (+) strand; PAM type: YTN; PAM sequence: CTT
aagaggacccccaggatatg

SEQ ID NO: 29832 - DNA, 20 bp, Artificial Sequence
  Description of Artificial Sequence: Synthetic oligonucleotide
  Target: COL7A1; (+) strand; PAM type: YTN; PAM sequence: TTA
agaggacccccaggatatgt

SEQ ID NO: 29833 - DNA, 20 bp, Artificial Sequence
  Description of Artificial Sequence: Synthetic oligonucleotide
  Target: COL7A1; (+) strand; PAM type: YTN; PAM sequence: CTG
gctctggacctgggcctggg

SEQ ID NO: 29834 - DNA, 20 bp, Artificial Sequence
  Description of Artificial Sequence: Synthetic oligonucleotide
  Target: COL7A1; (+) strand; PAM type: YTN; PAM sequence: CTC
tggacctgggcctgggcctg

SEQ ID NO: 29835 - DNA, 20 bp, Artificial Sequence
  Description of Artificial Sequence: Synthetic oligonucleotide
  Target: COL7A1; (+) strand; PAM type: YTN; PAM sequence: CTG
gacctgggcctgggcctggg

SEQ ID NO: 29836 - DNA, 20 bp, Artificial Sequence
  Description of Artificial Sequence: Synthetic oligonucleotide
  Target: COL7A1; (+) strand; PAM type: YTN; PAM sequence: CTG
ggcctgggcctgggcctggg

SEQ ID NO: 29837 - DNA, 20 bp, Artificial Sequence
  Description of Artificial Sequence: Synthetic oligonucleotide
  Target: COL7A1; (+) strand; PAM type: YTN; PAM sequence: CTG
ggcctgggcctggggcagaa

SEQ ID NO: 29838 - DNA, 20 bp, Artificial Sequence
  Description of Artificial Sequence: Synthetic oligonucleotide
  Target: COL7A1; (+) strand; PAM type: YTN; PAM sequence: CTG
ggcctggggcagaacttgcc

SEQ ID NO: 29839 - DNA, 20 bp, Artificial Sequence
  Description of Artificial Sequence: Synthetic oligonucleotide
  Target: COL7A1; (+) strand; PAM type: YTN; PAM sequence: CTG
gggcagaacttgcctggggt

SEQ ID NO: 29840 - DNA, 20 bp, Artificial Sequence
  Description of Artificial Sequence: Synthetic oligonucleotide
  Target: COL7A1; (+) strand; PAM type: YTN; PAM sequence: CTT
gcctggggtcccaggagtcc

SEQ ID NO: 29841 - DNA, 20 bp, Artificial Sequence
  Description of Artificial Sequence: Synthetic oligonucleotide
  Target: COL7A1; (+) strand; PAM type: YTN; PAM sequence: TTG
cctggggtcccaggagtcca

SEQ ID NO: 29842 - DNA, 20 bp, Artificial Sequence
  Description of Artificial Sequence: Synthetic oligonucleotide
  Target: COL7A1; (+) strand; PAM type: YTN; PAM sequence: CTG
gggtcccaggagtccacgca

SEQ ID NO: 29843 - DNA, 20 bp, Artificial Sequence
  Description of Artificial Sequence: Synthetic oligonucleotide
  Target: COL7A1; (+) strand; PAM type: YTN; PAM sequence: CTG
gcaacccggctgagcccttg

SEQ ID NO: 29844 - DNA, 20 bp, Artificial Sequence
  Description of Artificial Sequence: Synthetic oligonucleotide
  Target: COL7A1; (+) strand; PAM type: YTN; PAM sequence: CTG
agcccttgtcaccaggctct

SEQ ID NO: 29845 - DNA, 20 bp, Artificial Sequence
  Description of Artificial Sequence: Synthetic oligonucleotide
  Target: COL7A1; (+) strand; PAM type: YTN; PAM sequence: CTT
gtcaccaggctctcccttgc

SEQ ID NO: 29846 - DNA, 20 bp, Artificial Sequence
  Description of Artificial Sequence: Synthetic oligonucleotide
  Target: COL7A1; (+) strand; PAM type: YTN; PAM sequence: TTG
tcaccaggctctcccttgct

SEQ ID NO: 29847 - DNA, 20 bp, Artificial Sequence
  Description of Artificial Sequence: Synthetic oligonucleotide
  Target: COL7A1; (+) strand; PAM type: YTN; PAM sequence: CTC
tcccttgctgccctgtggga

SEQ ID NO: 29848 - DNA, 20 bp, Artificial Sequence
  Description of Artificial Sequence: Synthetic oligonucleotide
  Target: COL7A1; (+) strand; PAM type: YTN; PAM sequence: CTC
ccttgctgccctgtgggagt

SEQ ID NO: 29849 - DNA, 20 bp, Artificial Sequence
  Description of Artificial Sequence: Synthetic oligonucleotide
  Target: COL7A1; (+) strand; PAM type: YTN; PAM sequence: CTT
gctgccctgtgggagtgacc

SEQ ID NO: 29850 - DNA, 20 bp, Artificial Sequence
  Description of Artificial Sequence: Synthetic oligonucleotide
  Target: COL7A1; (+) strand; PAM type: YTN; PAM sequence: TTG
ctgccctgtgggagtgacca

SEQ ID NO: 29851 - DNA, 20 bp, Artificial Sequence
  Description of Artificial Sequence: Synthetic oligonucleotide
  Target: COL7A1; (+) strand; PAM type: YTN; PAM sequence: CTG
ccctgtgggagtgaccagga

SEQ ID NO: 29852 - DNA, 20 bp, Artificial Sequence
  Description of Artificial Sequence: Synthetic oligonucleotide
  Target: COL7A1; (+) strand; PAM type: YTN; PAM sequence: CTG
tgggagtgaccaggagaggg

SEQ ID NO: 29853 - DNA, 20 bp, Artificial Sequence
  Description of Artificial Sequence: Synthetic oligonucleotide
  Target: COL7A1; (+) strand; PAM type: YTN; PAM sequence: TTC
agtcaggaccagatcaggct

SEQ ID NO: 29854 - DNA, 20 bp, Artificial Sequence
  Description of Artificial Sequence: Synthetic oligonucleotide
  Target: COL7A1; (+) strand; PAM type: YTN; PAM sequence: CTG
ggggcttagaatacaacgag

SEQ ID NO: 29855 - DNA, 20 bp, Artificial Sequence
  Description of Artificial Sequence: Synthetic oligonucleotide
  Target: COL7A1; (+) strand; PAM type: YTN; PAM sequence: CTT
agaatacaacgagcccgcca

SEQ ID NO: 29856 - DNA, 20 bp, Artificial Sequence
  Description of Artificial Sequence: Synthetic oligonucleotide
  Target: COL7A1; (+) strand; PAM type: YTN; PAM sequence: TTA
gaatacaacgagcccgccag

SEQ ID NO: 29857 - DNA, 20 bp, Artificial Sequence
  Description of Artificial Sequence: Synthetic oligonucleotide
  Target: COL7A1; (+) strand; PAM type: YTN; PAM sequence: CTG
gggcagagctcaagtcactc

SEQ ID NO: 29858 - DNA, 20 bp, Artificial Sequence
  Description of Artificial Sequence: Synthetic oligonucleotide
  Target: COL7A1; (+) strand; PAM type: YTN; PAM sequence: CTC
aagtcactcccgaacggccc

SEQ ID NO: 29859 - DNA, 20 bp, Artificial Sequence
  Description of Artificial Sequence: Synthetic oligonucleotide
  Target: COL7A1; (+) strand; PAM type: YTN; PAM sequence: CTC
ccgaacggccctagcagcac

SEQ ID NO: 29860 - DNA, 20 bp, Artificial Sequence
  Description of Artificial Sequence: Synthetic oligonucleotide
  Target: COL7A1; (+) strand; PAM type: YTN; PAM sequence: CTA
gcagcacgtcctcccagcct

SEQ ID NO: 29861 - DNA, 20 bp, Artificial Sequence
  Description of Artificial Sequence: Synthetic oligonucleotide
  Target: COL7A1; (+) strand; PAM type: YTN; PAM sequence: CTC
ccagcctgtgccatagcggg

SEQ ID NO: 29862 - DNA, 20 bp, Artificial Sequence
  Description of Artificial Sequence: Synthetic oligonucleotide
  Target: COL7A1; (+) strand; PAM type: YTN; PAM sequence: CTG
tgccatagcgggtggaactg

SEQ ID NO: 29863 - DNA, 20 bp, Artificial Sequence
  Description of Artificial Sequence: Synthetic oligonucleotide
  Target: COL7A1; (+) strand; PAM type: YTN; PAM sequence: CTG
ggggctgtagtccacagact

SEQ ID NO: 29864 - DNA, 20 bp, Artificial Sequence
  Description of Artificial Sequence: Synthetic oligonucleotide
  Target: COL7A1; (+) strand; PAM type: YTN; PAM sequence: CTG
tagtccacagactggctcat

SEQ ID NO: 29865 - DNA, 20 bp, Artificial Sequence
  Description of Artificial Sequence: Synthetic oligonucleotide
  Target: COL7A1; (+) strand; PAM type: YTN; PAM sequence: CTG
gctcatttctcaccccaagg

SEQ ID NO: 29866 - DNA, 20 bp, Artificial Sequence
  Description of Artificial Sequence: Synthetic oligonucleotide
  Target: COL7A1; (+) strand; PAM type: YTN; PAM sequence: CTC
atttctcaccccaaggactc

SEQ ID NO: 29867 - DNA, 20 bp, Artificial Sequence
  Description of Artificial Sequence: Synthetic oligonucleotide
  Target: COL7A1; (+) strand; PAM type: YTN; PAM sequence: TTT
ctcaccccaaggactccaga

SEQ ID NO: 29868 - DNA, 20 bp, Artificial Sequence
  Description of Artificial Sequence: Synthetic oligonucleotide
  Target: COL7A1; (+) strand; PAM type: YTN; PAM sequence: TTC
tcaccccaaggactccagac

SEQ ID NO: 29869 - DNA, 20 bp, Artificial Sequence
  Description of Artificial Sequence: Synthetic oligonucleotide
  Target: COL7A1; (+) strand; PAM type: YTN; PAM sequence: CTC
accccaaggactccagaccc

SEQ ID NO: 29870 - DNA, 20 bp, Artificial Sequence
  Description of Artificial Sequence: Synthetic oligonucleotide
  Target: COL7A1; (+) strand; PAM type: YTN; PAM sequence: CTC
cagacccttgccccgccctc

SEQ ID NO: 29871 - DNA, 20 bp, Artificial Sequence
  Description of Artificial Sequence: Synthetic oligonucleotide
  Target: COL7A1; (+) strand; PAM type: YTN; PAM sequence: CTT
gccccgccctcttatcactg

SEQ ID NO: 29872 - DNA, 20 bp, Artificial Sequence
  Description of Artificial Sequence: Synthetic oligonucleotide
  Target: COL7A1; (+) strand; PAM type: YTN; PAM sequence: TTG
ccccgccctcttatcactgg

SEQ ID NO: 29873 - DNA, 20 bp, Artificial Sequence
  Description of Artificial Sequence: Synthetic oligonucleotide
  Target: COL7A1; (+) strand; PAM type: YTN; PAM sequence: CTC
ttatcactgggttcctcatc

SEQ ID NO: 29874 - DNA, 20 bp, Artificial Sequence
  Description of Artificial Sequence: Synthetic oligonucleotide
  Target: COL7A1; (+) strand; PAM type: YTN; PAM sequence: CTT
atcactgggttcctcatccc

SEQ ID NO: 29875 - DNA, 20 bp, Artificial Sequence
  Description of Artificial Sequence: Synthetic oligonucleotide
  Target: COL7A1; (+) strand; PAM type: YTN; PAM sequence: TTA
tcactgggttcctcatccca

SEQ ID NO: 29876 - DNA, 20 bp, Artificial Sequence
  Description of Artificial Sequence: Synthetic oligonucleotide
  Target: COL7A1; (+) strand; PAM type: YTN; PAM sequence: CTG
ggttcctcatcccatctgaa

SEQ ID NO: 29877 - DNA, 20 bp, Artificial Sequence
  Description of Artificial Sequence: Synthetic oligonucleotide
  Target: COL7A1; (+) strand; PAM type: YTN; PAM sequence: TTC
ctcatcccatctgaagcacc

SEQ ID NO: 29878 - DNA, 20 bp, Artificial Sequence
  Description of Artificial Sequence: Synthetic oligonucleotide
  Target: COL7A1; (+) strand; PAM type: YTN; PAM sequence: CTC
atcccatctgaagcaccttc

SEQ ID NO: 29879 - DNA, 20 bp, Artificial Sequence
  Description of Artificial Sequence: Synthetic oligonucleotide
  Target: COL7A1; (+) strand; PAM type: YTN; PAM sequence: CTG
aagcaccttcagatggggac

SEQ ID NO: 29880 - DNA, 20 bp, Artificial Sequence
  Description of Artificial Sequence: Synthetic oligonucleotide
  Target: COL7A1; (+) strand; PAM type: YTN; PAM sequence: CTT
cagatggggacacccaagga

SEQ ID NO: 29881 - DNA, 20 bp, Artificial Sequence
  Description of Artificial Sequence: Synthetic oligonucleotide
  Target: COL7A1; (+) strand; PAM type: YTN; PAM sequence: TTC
agatggggacacccaaggag

SEQ ID NO: 29882 - DNA, 20 bp, Artificial Sequence
  Description of Artificial Sequence: Synthetic oligonucleotide
  Target: COL7A1; (+) strand; PAM type: YTN; PAM sequence: CTT
tcctgtccctatagggcccc

SEQ ID NO: 29883 - DNA, 20 bp, Artificial Sequence
  Description of Artificial Sequence: Synthetic oligonucleotide
  Target: COL7A1; (+) strand; PAM type: YTN; PAM sequence: TTT
cctgtccctatagggcccct

SEQ ID NO: 29884 - DNA, 20 bp, Artificial Sequence
  Description of Artificial Sequence: Synthetic oligonucleotide
  Target: COL7A1; (+) strand; PAM type: YTN; PAM sequence: TTC
ctgtccctatagggcccctt

SEQ ID NO: 29885 - DNA, 20 bp, Artificial Sequence
  Description of Artificial Sequence: Synthetic oligonucleotide
  Target: COL7A1; (+) strand; PAM type: YTN; PAM sequence: CTG
tccctatagggccccttcat

SEQ ID NO: 29886 - DNA, 20 bp, Artificial Sequence
  Description of Artificial Sequence: Synthetic oligonucleotide
  Target: COL7A1; (+) strand; PAM type: YTN; PAM sequence: CTA
tagggccccttcatagggcc

SEQ ID NO: 29887 - DNA, 20 bp, Artificial Sequence
  Description of Artificial Sequence: Synthetic oligonucleotide
  Target: COL7A1; (+) strand; PAM type: YTN; PAM sequence: CTT
catagggccagtccacagag

SEQ ID NO: 29888 - DNA, 20 bp, Artificial Sequence
  Description of Artificial Sequence: Synthetic oligonucleotide
  Target: COL7A1; (+) strand; PAM type: YTN; PAM sequence: TTC
atagggccagtccacagagc

SEQ ID NO: 29889 - DNA, 20 bp, Artificial Sequence
  Description of Artificial Sequence: Synthetic oligonucleotide
  Target: COL7A1; (+) strand; PAM type: YTN; PAM sequence: CTC
tcctaacctcacaccaaggc

SEQ ID NO: 29890 - DNA, 20 bp, Artificial Sequence
  Description of Artificial Sequence: Synthetic oligonucleotide
  Target: COL7A1; (+) strand; PAM type: YTN; PAM sequence: CTC
ctaacctcacaccaaggcct

SEQ ID NO: 29891 - DNA, 20 bp, Artificial Sequence
  Description of Artificial Sequence: Synthetic oligonucleotide
  Target: COL7A1; (+) strand; PAM type: YTN; PAM sequence: CTA
acctcacaccaaggccttga

SEQ ID NO: 29892 - DNA, 20 bp, Artificial Sequence
  Description of Artificial Sequence: Synthetic oligonucleotide
  Target: COL7A1; (+) strand; PAM type: YTN; PAM sequence: CTC
acaccaaggccttgagccct

SEQ ID NO: 29893 - DNA, 20 bp, Artificial Sequence
  Description of Artificial Sequence: Synthetic oligonucleotide
  Target: COL7A1; (+) strand; PAM type: YTN; PAM sequence: CTT
gagccctccctagagcccct

SEQ ID NO: 29894 - DNA, 20 bp, Artificial Sequence
  Description of Artificial Sequence: Synthetic oligonucleotide
  Target: COL7A1; (+) strand; PAM type: YTN; PAM sequence: TTG
agccctccctagagcccctc

SEQ ID NO: 29895 - DNA, 20 bp, Artificial Sequence
  Description of Artificial Sequence: Synthetic oligonucleotide
  Target: COL7A1; (+) strand; PAM type: YTN; PAM sequence: CTC
cctagagcccctcctctcgg

SEQ ID NO: 29896 - DNA, 20 bp, Artificial Sequence
  Description of Artificial Sequence: Synthetic oligonucleotide
  Target: COL7A1; (+) strand; PAM type: YTN; PAM sequence: CTA
gagcccctcctctcggccac

SEQ ID NO: 29897 - DNA, 20 bp, Artificial Sequence
  Description of Artificial Sequence: Synthetic oligonucleotide
  Target: COL7A1; (+) strand; PAM type: YTN; PAM sequence: CTC
ctctcggccactccatagtc

SEQ ID NO: 29898 - DNA, 20 bp, Artificial Sequence
  Description of Artificial Sequence: Synthetic oligonucleotide
  Target: COL7A1; (+) strand; PAM type: YTN; PAM sequence: CTC
tcggccactccatagtcagc

SEQ ID NO: 29899 - DNA, 20 bp, Artificial Sequence
  Description of Artificial Sequence: Synthetic oligonucleotide
  Target: COL7A1; (+) strand; PAM type: YTN; PAM sequence: CTC
ggccactccatagtcagcca

SEQ ID NO: 29900 - DNA, 20 bp, Artificial Sequence
  Description of Artificial Sequence: Synthetic oligonucleotide
  Target: COL7A1; (+) strand; PAM type: YTN; PAM sequence: CTC
catagtcagccacagaaccc

SEQ ID NO: 29901 - DNA, 20 bp, Artificial Sequence
  Description of Artificial Sequence: Synthetic oligonucleotide
  Target: COL7A1; (+) strand; PAM type: YTN; PAM sequence: CTT
ccccctaaaccccagaaagc

SEQ ID NO: 29902 - DNA, 20 bp, Artificial Sequence
  Description of Artificial Sequence: Synthetic oligonucleotide
  Target: COL7A1; (+) strand; PAM type: YTN; PAM sequence: TTC
cccctaaaccccagaaagcc

SEQ ID NO: 29903 - DNA, 20 bp, Artificial Sequence
  Description of Artificial Sequence: Synthetic oligonucleotide
  Target: COL7A1; (+) strand; PAM type: YTN; PAM sequence: CTA
aaccccagaaagcctcctcc

SEQ ID NO: 29904 - DNA, 20 bp, Artificial Sequence
  Description of Artificial Sequence: Synthetic oligonucleotide
  Target: COL7A1; (+) strand; PAM type: YTN; PAM sequence: CTC
ctcctgtcctcccctcctgc

SEQ ID NO: 29905 - DNA, 20 bp, Artificial Sequence
  Description of Artificial Sequence: Synthetic oligonucleotide
  Target: COL7A1; (+) strand; PAM type: YTN; PAM sequence: CTC
ctgtcctcccctcctgccct

SEQ ID NO: 29906 - DNA, 20 bp, Artificial Sequence
  Description of Artificial Sequence: Synthetic oligonucleotide
  Target: COL7A1; (+) strand; PAM type: YTN; PAM sequence: CTG
tcctcccctcctgccctcac

SEQ ID NO: 29907 - DNA, 20 bp, Artificial Sequence
  Description of Artificial Sequence: Synthetic oligonucleotide
  Target: COL7A1; (+) strand; PAM type: YTN; PAM sequence: CTC
ccctcctgccctcacagatg

SEQ ID NO: 29908 - DNA, 20 bp, Artificial Sequence
  Description of Artificial Sequence: Synthetic oligonucleotide
  Target: COL7A1; (+) strand; PAM type: YTN; PAM sequence: CTC
ctgccctcacagatgctgtg

SEQ ID NO: 29909 - DNA, 20 bp, Artificial Sequence
  Description of Artificial Sequence: Synthetic oligonucleotide
  Target: COL7A1; (+) strand; PAM type: YTN; PAM sequence: CTG
ccctcacagatgctgtggaa

SEQ ID NO: 29910 - DNA, 20 bp, Artificial Sequence
  Description of Artificial Sequence: Synthetic oligonucleotide
  Target: COL7A1; (+) strand; PAM type: YTN; PAM sequence: CTC
acagatgctgtggaaccacc

SEQ ID NO: 29911 - DNA, 20 bp, Artificial Sequence
  Description of Artificial Sequence: Synthetic oligonucleotide
  Target: COL7A1; (+) strand; PAM type: YTN; PAM sequence: CTG
tggaaccaccacagccacag

SEQ ID NO: 29912 - DNA, 20 bp, Artificial Sequence
  Description of Artificial Sequence: Synthetic oligonucleotide
  Target: COL7A1; (+) strand; PAM type: YTN; PAM sequence: CTC
ttccctgtaccttgtcacca

SEQ ID NO: 29913 - DNA, 20 bp, Artificial Sequence
  Description of Artificial Sequence: Synthetic oligonucleotide
  Target: COL7A1; (+) strand; PAM type: YTN; PAM sequence: CTT
ccctgtaccttgtcaccagg

SEQ ID NO: 29914 - DNA, 20 bp, Artificial Sequence
  Description of Artificial Sequence: Synthetic oligonucleotide
  Target: COL7A1; (+) strand; PAM type: YTN; PAM sequence: TTC
cctgtaccttgtcaccaggg

SEQ ID NO: 29915 - DNA, 20 bp, Artificial Sequence
  Description of Artificial Sequence: Synthetic oligonucleotide
  Target: COL7A1; (+) strand; PAM type: YTN; PAM sequence: CTG
taccttgtcaccagggtccc

SEQ ID NO: 29916 - DNA, 20 bp, Artificial Sequence
  Description of Artificial Sequence: Synthetic oligonucleotide
  Target: COL7A1; (+) strand; PAM type: YTN; PAM sequence: CTT
gtcaccagggtccccattgt

SEQ ID NO: 29917 - DNA, 20 bp, Artificial Sequence
  Description of Artificial Sequence: Synthetic oligonucleotide
  Target: COL7A1; (+) strand; PAM type: YTN; PAM sequence: TTG
tcaccagggtccccattgtc

SEQ ID NO: 29918 - DNA, 20 bp, Artificial Sequence
  Description of Artificial Sequence: Synthetic oligonucleotide
  Target: COL7A1; (+) strand; PAM type: YTN; PAM sequence: TTG
tctccccgaggtcctttgtc

SEQ ID NO: 29919 - DNA, 20 bp, Artificial Sequence
  Description of Artificial Sequence: Synthetic oligonucleotide
  Target: COL7A1; (+) strand; PAM type: YTN; PAM sequence: CTC
cccgaggtcctttgtcacca

SEQ ID NO: 29920 - DNA, 20 bp, Artificial Sequence
  Description of Artificial Sequence: Synthetic oligonucleotide
  Target: COL7A1; (+) strand; PAM type: YTN; PAM sequence: CTT
tgtcaccatccaagccccga

SEQ ID NO: 29921 - DNA, 20 bp, Artificial Sequence
  Description of Artificial Sequence: Synthetic oligonucleotide
  Target: COL7A1; (+) strand; PAM type: YTN; PAM sequence: TTT
gtcaccatccaagccccgag

SEQ ID NO: 29922 - DNA, 20 bp, Artificial Sequence
  Description of Artificial Sequence: Synthetic oligonucleotide
  Target: COL7A1; (+) strand; PAM type: YTN; PAM sequence: TTG
tcaccatccaagccccgagg

SEQ ID NO: 29923 - DNA, 20 bp, Artificial Sequence
  Description of Artificial Sequence: Synthetic oligonucleotide
  Target: COL7A1; (+) strand; PAM type: YTN; PAM sequence: CTC
gttcaccctgggttggtttg

SEQ ID NO: 29924 - DNA, 20 bp, Artificial Sequence
  Description of Artificial Sequence: Synthetic oligonucleotide
  Target: COL7A1; (+) strand; PAM type: YTN; PAM sequence: TTC
accctgggttggtttgggta

SEQ ID NO: 29925 - DNA, 20 bp, Artificial Sequence
  Description of Artificial Sequence: Synthetic oligonucleotide
  Target: COL7A1; (+) strand; PAM type: YTN; PAM sequence: CTG
ggttggtttgggtaagaagt

SEQ ID NO: 29926 - DNA, 20 bp, Artificial Sequence
  Description of Artificial Sequence: Synthetic oligonucleotide
  Target: COL7A1; (+) strand; PAM type: YTN; PAM sequence: TTG
gtttgggtaagaagtcacgg

SEQ ID NO: 29927 - DNA, 20 bp, Artificial Sequence
  Description of Artificial Sequence: Synthetic oligonucleotide
  Target: COL7A1; (+) strand; PAM type: YTN; PAM sequence: TTT
gggtaagaagtcacggtaag

SEQ ID NO: 29928 - DNA, 20 bp, Artificial Sequence
  Description of Artificial Sequence: Synthetic oligonucleotide
  Target: COL7A1; (+) strand; PAM type: YTN; PAM sequence: TTG
ggtaagaagtcacggtaagg

SEQ ID NO: 29929 - DNA, 20 bp, Artificial Sequence
  Description of Artificial Sequence: Synthetic oligonucleotide
  Target: COL7A1; (+) strand; PAM type: YTN; PAM sequence: CTG
aaggtccctcaccctctggg

SEQ ID NO: 29930 - DNA, 20 bp, Artificial Sequence
  Description of Artificial Sequence: Synthetic oligonucleotide
  Target: COL7A1; (+) strand; PAM type: YTN; PAM sequence: CTC
accctctgggagtttgagct

SEQ ID NO: 29931 - DNA, 20 bp, Artificial Sequence
  Description of Artificial Sequence: Synthetic oligonucleotide
  Target: COL7A1; (+) strand; PAM type: YTN; PAM sequence: CTC
tgggagtttgagctctcaga

SEQ ID NO: 29932 - DNA, 20 bp, Artificial Sequence
  Description of Artificial Sequence: Synthetic oligonucleotide
  Target: COL7A1; (+) strand; PAM type: YTN; PAM sequence: CTG
ggagtttgagctctcagatg

SEQ ID NO: 29933 - DNA, 20 bp, Artificial Sequence
  Description of Artificial Sequence: Synthetic oligonucleotide
  Target: COL7A1; (+) strand; PAM type: YTN; PAM sequence: TTT
gagctctcagatgccctggg

SEQ ID NO: 29934 - DNA, 20 bp, Artificial Sequence
  Description of Artificial Sequence: Synthetic oligonucleotide
  Target: COL7A1; (+) strand; PAM type: YTN; PAM sequence: TTG
agctctcagatgccctgggc

SEQ ID NO: 29935 - DNA, 20 bp, Artificial Sequence
  Description of Artificial Sequence: Synthetic oligonucleotide
  Target: COL7A1; (+) strand; PAM type: YTN; PAM sequence: CTC
tcagatgccctgggccagcc

SEQ ID NO: 29936 - DNA, 20 bp, Artificial Sequence
  Description of Artificial Sequence: Synthetic oligonucleotide
  Target: COL7A1; (+) strand; PAM type: YTN; PAM sequence: CTC
agatgccctgggccagcccc

SEQ ID NO: 29937 - DNA, 20 bp, Artificial Sequence
  Description of Artificial Sequence: Synthetic oligonucleotide
  Target: COL7A1; (+) strand; PAM type: YTN; PAM sequence: CTG
ggccagccccacggggtccc

SEQ ID NO: 29938 - DNA, 20 bp, Artificial Sequence
  Description of Artificial Sequence: Synthetic oligonucleotide
  Target: COL7A1; (+) strand; PAM type: YTN; PAM sequence: CTC
tcgcacccaggggagaccca

SEQ ID NO: 29939 - DNA, 20 bp, Artificial Sequence
  Description of Artificial Sequence: Synthetic oligonucleotide
  Target: COL7A1; (+) strand; PAM type: YTN; PAM sequence: CTC
gcacccaggggagacccagt

SEQ ID NO: 29940 - DNA, 20 bp, Artificial Sequence
  Description of Artificial Sequence: Synthetic oligonucleotide
  Target: COL7A1; (+) strand; PAM type: YTN; PAM sequence: CTC
accatgtcccccttggcacc

SEQ ID NO: 29941 - DNA, 20 bp, Artificial Sequence
  Description of Artificial Sequence: Synthetic oligonucleotide
  Target: COL7A1; (+) strand; PAM type: YTN; PAM sequence: CTT
ggcaccccgtgggcctggag

SEQ ID NO: 29942 - DNA, 20 bp, Artificial Sequence
  Description of Artificial Sequence: Synthetic oligonucleotide
  Target: COL7A1; (+) strand; PAM type: YTN; PAM sequence: TTG
gcaccccgtgggcctggagg

SEQ ID NO: 29943 - DNA, 20 bp, Artificial Sequence
  Description of Artificial Sequence: Synthetic oligonucleotide
  Target: COL7A1; (+) strand; PAM type: YTN; PAM sequence: CTG
gaggccccaggatcacagct

SEQ ID NO: 29944 - DNA, 20 bp, Artificial Sequence
  Description of Artificial Sequence: Synthetic oligonucleotide
  Target: COL7A1; (+) strand; PAM type: YTN; PAM sequence: CTG
agtctccctgagggggcagg

SEQ ID NO: 29945 - DNA, 20 bp, Artificial Sequence
  Description of Artificial Sequence: Synthetic oligonucleotide
  Target: COL7A1; (+) strand; PAM type: YTN; PAM sequence: CTC
cctgagggggcaggcaggaa

SEQ ID NO: 29946 - DNA, 20 bp, Artificial Sequence
  Description of Artificial Sequence: Synthetic oligonucleotide
  Target: COL7A1; (+) strand; PAM type: YTN; PAM sequence: CTG
agggggcaggcaggaatcag

SEQ ID NO: 29947 - DNA, 20 bp, Artificial Sequence
  Description of Artificial Sequence: Synthetic oligonucleotide
  Target: COL7A1; (+) strand; PAM type: YTN; PAM sequence: CTG
gcccctgccctgccctcccc

SEQ ID NO: 29948 - DNA, 20 bp, Artificial Sequence
  Description of Artificial Sequence: Synthetic oligonucleotide
  Target: COL7A1; (+) strand; PAM type: YTN; PAM sequence: CTG
ccctgccctccccatgccca

SEQ ID NO: 29949 - DNA, 20 bp, Artificial Sequence
  Description of Artificial Sequence: Synthetic oligonucleotide
  Target: COL7A1; (+) strand; PAM type: YTN; PAM sequence: CTG
ccctccccatgcccacactc

SEQ ID NO: 29950 - DNA, 20 bp, Artificial Sequence
  Description of Artificial Sequence: Synthetic oligonucleotide
  Target: COL7A1; (+) strand; PAM type: YTN; PAM sequence: CTC
cccatgcccacactcacctt

SEQ ID NO: 29951 - DNA, 20 bp, Artificial Sequence
  Description of Artificial Sequence: Synthetic oligonucleotide
  Target: COL7A1; (+) strand; PAM type: YTN; PAM sequence: CTC
accttgtcaccctttagtcc

SEQ ID NO: 29952 - DNA, 20 bp, Artificial Sequence
  Description of Artificial Sequence: Synthetic oligonucleotide
  Target: COL7A1; (+) strand; PAM type: YTN; PAM sequence: CTT
gtcaccctttagtcctgcac

SEQ ID NO: 29953 - DNA, 20 bp, Artificial Sequence
  Description of Artificial Sequence: Synthetic oligonucleotide
  Target: COL7A1; (+) strand; PAM type: YTN; PAM sequence: TTG
tcaccctttagtcctgcact

SEQ ID NO: 29954 - DNA, 20 bp, Artificial Sequence
  Description of Artificial Sequence: Synthetic oligonucleotide
  Target: COL7A1; (+) strand; PAM type: YTN; PAM sequence: CTT
tagtcctgcactcccaacat

SEQ ID NO: 29955 - DNA, 20 bp, Artificial Sequence
  Description of Artificial Sequence: Synthetic oligonucleotide
  Target: COL7A1; (+) strand; PAM type: YTN; PAM sequence: TTT
agtcctgcactcccaacatc

SEQ ID NO: 29956 - DNA, 20 bp, Artificial Sequence
  Description of Artificial Sequence: Synthetic oligonucleotide
  Target: COL7A1; (+) strand; PAM type: YTN; PAM sequence: TTA
gtcctgcactcccaacatca

SEQ ID NO: 29957 - DNA, 20 bp, Artificial Sequence
  Description of Artificial Sequence: Synthetic oligonucleotide
  Target: COL7A1; (+) strand; PAM type: YTN; PAM sequence: CTG
cactcccaacatcaccctat

SEQ ID NO: 29958 - DNA, 20 bp, Artificial Sequence
  Description of Artificial Sequence: Synthetic oligonucleotide
  Target: COL7A1; (+) strand; PAM type: YTN; PAM sequence: CTC
ccaacatcaccctattgggc

SEQ ID NO: 29959 - DNA, 20 bp, Artificial Sequence
  Description of Artificial Sequence: Synthetic oligonucleotide
  Target: COL7A1; (+) strand; PAM type: YTN; PAM sequence: CTA
ttgggcaaaagagtgtgagt

SEQ ID NO: 29960 - DNA, 20 bp, Artificial Sequence
  Description of Artificial Sequence: Synthetic oligonucleotide
  Target: COL7A1; (+) strand; PAM type: YTN; PAM sequence: TTG
ggcaaaagagtgtgagtccc

SEQ ID NO: 29961 - DNA, 20 bp, Artificial Sequence
  Description of Artificial Sequence: Synthetic oligonucleotide
  Target: COL7A1; (+) strand; PAM type: YTN; PAM sequence: CTG
gggaggccccgcacctgaat

SEQ ID NO: 29962 - DNA, 20 bp, Artificial Sequence
  Description of Artificial Sequence: Synthetic oligonucleotide
  Target: COL7A1; (+) strand; PAM type: YTN; PAM sequence: CTG
aattctaatatcatacaaga

SEQ ID NO: 29963 - DNA, 20 bp, Artificial Sequence
  Description of Artificial Sequence: Synthetic oligonucleotide
  Target: COL7A1; (+) strand; PAM type: YTN; PAM sequence: TTC
taatatcatacaagatccac

SEQ ID NO: 29964 - DNA, 20 bp, Artificial Sequence
  Description of Artificial Sequence: Synthetic oligonucleotide
  Target: COL7A1; (+) strand; PAM type: YTN; PAM sequence: CTA
atatcatacaagatccactc

SEQ ID NO: 29965 - DNA, 20 bp, Artificial Sequence
  Description of Artificial Sequence: Synthetic oligonucleotide
  Target: COL7A1; (+) strand; PAM type: YTN; PAM sequence: CTC
acccccccactcatgccagg

SEQ ID NO: 29966 - DNA, 20 bp, Artificial Sequence
  Description of Artificial Sequence: Synthetic oligonucleotide
  Target: COL7A1; (+) strand; PAM type: YTN; PAM sequence: CTC
atgccaggaccttccccacg

SEQ ID NO: 29967 - DNA, 20 bp, Artificial Sequence
  Description of Artificial Sequence: Synthetic oligonucleotide
  Target: COL7A1; (+) strand; PAM type: YTN; PAM sequence: CTT
ccccacgttcctaccttctc

SEQ ID NO: 29968 - DNA, 20 bp, Artificial Sequence
  Description of Artificial Sequence: Synthetic oligonucleotide
  Target: COL7A1; (+) strand; PAM type: YTN; PAM sequence: TTC
cccacgttcctaccttctcc

SEQ ID NO: 29969 - DNA, 20 bp, Artificial Sequence
  Description of Artificial Sequence: Synthetic oligonucleotide
  Target: COL7A1; (+) strand; PAM type: YTN; PAM sequence: TTC
ctaccttctccccacgctct

SEQ ID NO: 29970 - DNA, 20 bp, Artificial Sequence
  Description of Artificial Sequence: Synthetic oligonucleotide
  Target: COL7A1; (+) strand; PAM type: YTN; PAM sequence: CTA
ccttctccccacgctctccc

SEQ ID NO: 29971 - DNA, 20 bp, Artificial Sequence
  Description of Artificial Sequence: Synthetic oligonucleotide
  Target: COL7A1; (+) strand; PAM type: YTN; PAM sequence: CTT
ctccccacgctctcccctgc

SEQ ID NO: 29972 - DNA, 20 bp, Artificial Sequence
  Description of Artificial Sequence: Synthetic oligonucleotide
  Target: COL7A1; (+) strand; PAM type: YTN; PAM sequence: TTC
tccccacgctctcccctgct

SEQ ID NO: 29973 - DNA, 20 bp, Artificial Sequence
  Description of Artificial Sequence: Synthetic oligonucleotide
  Target: COL7A1; (+) strand; PAM type: YTN; PAM sequence: CTC
cccacgctctcccctgctgc

SEQ ID NO: 29974 - DNA, 20 bp, Artificial Sequence
  Description of Artificial Sequence: Synthetic oligonucleotide
  Target: COL7A1; (+) strand; PAM type: YTN; PAM sequence: CTC
tcccctgctgccagggggcc

SEQ ID NO: 29975 - DNA, 20 bp, Artificial Sequence
  Description of Artificial Sequence: Synthetic oligonucleotide
  Target: COL7A1; (+) strand; PAM type: YTN; PAM sequence: CTC
ccctgctgccagggggcccc

SEQ ID NO: 29976 - DNA, 20 bp, Artificial Sequence
  Description of Artificial Sequence: Synthetic oligonucleotide
  Target: COL7A1; (+) strand; PAM type: YTN; PAM sequence: CTG
ctgccagggggcccctgtgt

SEQ ID NO: 29977 - DNA, 20 bp, Artificial Sequence
  Description of Artificial Sequence: Synthetic oligonucleotide
  Target: COL7A1; (+) strand; PAM type: YTN; PAM sequence: CTG
ccagggggcccctgtgtgag

SEQ ID NO: 29978 - DNA, 20 bp, Artificial Sequence
  Description of Artificial Sequence: Synthetic oligonucleotide
  Target: COL7A1; (+) strand; PAM type: YTN; PAM sequence: CTG
tgtgagagaaggtgaccgtg

SEQ ID NO: 29979 - DNA, 20 bp, Artificial Sequence
  Description of Artificial Sequence: Synthetic oligonucleotide
  Target: COL7A1; (+) strand; PAM type: YTN; PAM sequence: CTA
caggaaccagggcagtggag

SEQ ID NO: 29980 - DNA, 20 bp, Artificial Sequence
  Description of Artificial Sequence: Synthetic oligonucleotide
  Target: COL7A1; (+) strand; PAM type: YTN; PAM sequence: CTA
gggaggatggcagagagtcc

SEQ ID NO: 29981 - DNA, 20 bp, Artificial Sequence
  Description of Artificial Sequence: Synthetic oligonucleotide
  Target: COL7A1; (+) strand; PAM type: YTN; PAM sequence: CTG
gggtacaaagggcacaggca

SEQ ID NO: 29982 - DNA, 20 bp, Artificial Sequence
  Description of Artificial Sequence: Synthetic oligonucleotide
  Target: COL7A1; (+) strand; PAM type: YTN; PAM sequence: CTG
aagtcacagcactgtcactt

SEQ ID NO: 29983 - DNA, 20 bp, Artificial Sequence
  Description of Artificial Sequence: Synthetic oligonucleotide
  Target: COL7A1; (+) strand; PAM type: YTN; PAM sequence: CTG
tcactttccccagcgggacc

SEQ ID NO: 29984 - DNA, 20 bp, Artificial Sequence
  Description of Artificial Sequence: Synthetic oligonucleotide
  Target: COL7A1; (+) strand; PAM type: YTN; PAM sequence: CTT
tccccagcgggacccaccgt

SEQ ID NO: 29985 - DNA, 20 bp, Artificial Sequence
  Description of Artificial Sequence: Synthetic oligonucleotide
  Target: COL7A1; (+) strand; PAM type: YTN; PAM sequence: TTT
ccccagcgggacccaccgtg

SEQ ID NO: 29986 - DNA, 20 bp, Artificial Sequence
  Description of Artificial Sequence: Synthetic oligonucleotide
  Target: COL7A1; (+) strand; PAM type: YTN; PAM sequence: TTC
cccagcgggacccaccgtga

SEQ ID NO: 29987 - DNA, 20 bp, Artificial Sequence
  Description of Artificial Sequence: Synthetic oligonucleotide
  Target: COL7A1; (+) strand; PAM type: YTN; PAM sequence: CTC
ggggtccctcctggccgggg

SEQ ID NO: 29988 - DNA, 20 bp, Artificial Sequence
  Description of Artificial Sequence: Synthetic oligonucleotide
  Target: COL7A1; (+) strand; PAM type: YTN; PAM sequence: CTC
ctggccggggcggccatctt

SEQ ID NO: 29989 - DNA, 20 bp, Artificial Sequence
  Description of Artificial Sequence: Synthetic oligonucleotide
  Target: COL7A1; (+) strand; PAM type: YTN; PAM sequence: CTG
gccggggcggccatcttcac

SEQ ID NO: 29990 - DNA, 20 bp, Artificial Sequence
  Description of Artificial Sequence: Synthetic oligonucleotide
  Target: COL7A1; (+) strand; PAM type: YTN; PAM sequence: CTT
caccctggatggtgacatta

SEQ ID NO: 29991 - DNA, 20 bp, Artificial Sequence
  Description of Artificial Sequence: Synthetic oligonucleotide
  Target: COL7A1; (+) strand; PAM type: YTN; PAM sequence: TTC
accctggatggtgacattag

SEQ ID NO: 29992 - DNA, 20 bp, Artificial Sequence
  Description of Artificial Sequence: Synthetic oligonucleotide
  Target: COL7A1; (+) strand; PAM type: YTN; PAM sequence: CTG
gatggtgacattaggttcat

SEQ ID NO: 29993 - DNA, 20 bp, Artificial Sequence
  Description of Artificial Sequence: Synthetic oligonucleotide
  Target: COL7A1; (+) strand; PAM type: YTN; PAM sequence: TTA
ggttcattgactcagaggtt

SEQ ID NO: 29994 - DNA, 20 bp, Artificial Sequence
  Description of Artificial Sequence: Synthetic oligonucleotide
  Target: COL7A1; (+) strand; PAM type: YTN; PAM sequence: TTC
attgactcagaggttggaaa

SEQ ID NO: 29995 - DNA, 20 bp, Artificial Sequence
  Description of Artificial Sequence: Synthetic oligonucleotide
  Target: COL7A1; (+) strand; PAM type: YTN; PAM sequence: TTG
actcagaggttggaaatcag

SEQ ID NO: 29996 - DNA, 20 bp, Artificial Sequence
  Description of Artificial Sequence: Synthetic oligonucleotide
  Target: COL7A1; (+) strand; PAM type: YTN; PAM sequence: CTC
agaggttggaaatcagaggc

SEQ ID NO: 29997 - DNA, 20 bp, Artificial Sequence
  Description of Artificial Sequence: Synthetic oligonucleotide
  Target: COL7A1; (+) strand; PAM type: YTN; PAM sequence: TTG
gaaatcagaggcaagagctg

SEQ ID NO: 29998 - DNA, 20 bp, Artificial Sequence
  Description of Artificial Sequence: Synthetic oligonucleotide
  Target: COL7A1; (+) strand; PAM type: YTN; PAM sequence: CTG
ggatgaagggagttcggctg

SEQ ID NO: 29999 - DNA, 20 bp, Artificial Sequence
  Description of Artificial Sequence: Synthetic oligonucleotide
  Target: COL7A1; (+) strand; PAM type: YTN; PAM sequence: TTC
ggctgtggagtaagacatac

SEQ ID NO: 30000 - DNA, 20 bp, Artificial Sequence
  Description of Artificial Sequence: Synthetic oligonucleotide
  Target: COL7A1; (+) strand; PAM type: YTN; PAM sequence: CTG
tggagtaagacatacgtacc

SEQ ID NO: 30001 - DNA, 20 bp, Artificial Sequence
  Description of Artificial Sequence: Synthetic oligonucleotide
  Target: COL7A1; (+) strand; PAM type: YTN; PAM sequence: CTG
gctccccacgctcgcctcgg

SEQ ID NO: 30002 - DNA, 20 bp, Artificial Sequence
  Description of Artificial Sequence: Synthetic oligonucleotide
  Target: COL7A1; (+) strand; PAM type: YTN; PAM sequence: CTC
cccacgctcgcctcggggcc

SEQ ID NO: 30003 - DNA, 20 bp, Artificial Sequence
  Description of Artificial Sequence: Synthetic oligonucleotide
  Target: COL7A1; (+) strand; PAM type: YTN; PAM sequence: CTC
gcctcggggcccaggcagcc

SEQ ID NO: 30004 - DNA, 20 bp, Artificial Sequence
  Description of Artificial Sequence: Synthetic oligonucleotide
  Target: COL7A1; (+) strand; PAM type: YTN; PAM sequence: CTC
ggggcccaggcagccctact

SEQ ID NO: 30005 - DNA, 20 bp, Artificial Sequence
  Description of Artificial Sequence: Synthetic oligonucleotide
  Target: COL7A1; (+) strand; PAM type: YTN; PAM sequence: CTA
ctccagggtctccctggaga

SEQ ID NO: 30006 - DNA, 20 bp, Artificial Sequence
  Description of Artificial Sequence: Synthetic oligonucleotide
  Target: COL7A1; (+) strand; PAM type: YTN; PAM sequence: CTC
cagggtctccctggagacca

SEQ ID NO: 30007 - DNA, 20 bp, Artificial Sequence
  Description of Artificial Sequence: Synthetic oligonucleotide
  Target: COL7A1; (+) strand; PAM type: YTN; PAM sequence: CTC
cctggagaccaacaggacac

SEQ ID NO: 30008 - DNA, 20 bp, Artificial Sequence
  Description of Artificial Sequence: Synthetic oligonucleotide
  Target: COL7A1; (+) strand; PAM type: YTN; PAM sequence: CTG
gagaccaacaggacaccggg

SEQ ID NO: 30009 - DNA, 20 bp, Artificial Sequence
  Description of Artificial Sequence: Synthetic oligonucleotide
  Target: COL7A1; (+) strand; PAM type: YTN; PAM sequence: CTG
aagggggtgaccagggcaca

SEQ ID NO: 30010 - DNA, 20 bp, Artificial Sequence
  Description of Artificial Sequence: Synthetic oligonucleotide
  Target: COL7A1; (+) strand; PAM type: YTN; PAM sequence: CTT
gtcccacctaccttgtctcc

SEQ ID NO: 30011 - DNA, 20 bp, Artificial Sequence
  Description of Artificial Sequence: Synthetic oligonucleotide
  Target: COL7A1; (+) strand; PAM type: YTN; PAM sequence: TTG
tcccacctaccttgtctcct

SEQ ID NO: 30012 - DNA, 20 bp, Artificial Sequence
  Description of Artificial Sequence: Synthetic oligonucleotide
  Target: COL7A1; (+) strand; PAM type: YTN; PAM sequence: CTA
ccttgtctcctttgagtcca

SEQ ID NO: 30013 - DNA, 20 bp, Artificial Sequence
  Description of Artificial Sequence: Synthetic oligonucleotide
  Target: COL7A1; (+) strand; PAM type: YTN; PAM sequence: CTT
gtctcctttgagtccagagg

SEQ ID NO: 30014 - DNA, 20 bp, Artificial Sequence
  Description of Artificial Sequence: Synthetic oligonucleotide
  Target: COL7A1; (+) strand; PAM type: YTN; PAM sequence: TTG
tctcctttgagtccagaggc

SEQ ID NO: 30015 - DNA, 20 bp, Artificial Sequence
  Description of Artificial Sequence: Synthetic oligonucleotide
  Target: COL7A1; (+) strand; PAM type: YTN; PAM sequence: CTC
ctttgagtccagaggcccca

SEQ ID NO: 30016 - DNA, 20 bp, Artificial Sequence
  Description of Artificial Sequence: Synthetic oligonucleotide
  Target: COL7A1; (+) strand; PAM type: YTN; PAM sequence: CTT
tgagtccagaggccccaggt

SEQ ID NO: 30017 - DNA, 20 bp, Artificial Sequence
  Description of Artificial Sequence: Synthetic oligonucleotide
  Target: COL7A1; (+) strand; PAM type: YTN; PAM sequence: TTT
gagtccagaggccccaggtg

SEQ ID NO: 30018 - DNA, 20 bp, Artificial Sequence
  Description of Artificial Sequence: Synthetic oligonucleotide
  Target: COL7A1; (+) strand; PAM type: YTN; PAM sequence: TTG
agtccagaggccccaggtgg

SEQ ID NO: 30019 - DNA, 20 bp, Artificial Sequence
  Description of Artificial Sequence: Synthetic oligonucleotide
  Target: COL7A1; (+) strand; PAM type: YTN; PAM sequence: CTG
taggtcagagtgaggtgagg

SEQ ID NO: 30020 - DNA, 20 bp, Artificial Sequence
  Description of Artificial Sequence: Synthetic oligonucleotide
  Target: COL7A1; (+) strand; PAM type: YTN; PAM sequence: CTG
tggctctcaaagcgcctccc

SEQ ID NO: 30021 - DNA, 20 bp, Artificial Sequence
  Description of Artificial Sequence: Synthetic oligonucleotide
  Target: COL7A1; (+) strand; PAM type: YTN; PAM sequence: CTC
tcaaagcgcctcccccaaca

SEQ ID NO: 30022 - DNA, 20 bp, Artificial Sequence
  Description of Artificial Sequence: Synthetic oligonucleotide
  Target: COL7A1; (+) strand; PAM type: YTN; PAM sequence: CTC
aaagcgcctcccccaacacc

SEQ ID NO: 30023 - DNA, 20 bp, Artificial Sequence
  Description of Artificial Sequence: Synthetic oligonucleotide
  Target: COL7A1; (+) strand; PAM type: YTN; PAM sequence: CTC
ccccaacaccccacagtgtg

SEQ ID NO: 30024 - DNA, 20 bp, Artificial Sequence
  Description of Artificial Sequence: Synthetic oligonucleotide
  Target: COL7A1; (+) strand; PAM type: YTN; PAM sequence: CTA
agtcctcacgaggacaggaa

SEQ ID NO: 30025 - DNA, 20 bp, Artificial Sequence
  Description of Artificial Sequence: Synthetic oligonucleotide
  Target: COL7A1; (+) strand; PAM type: YTN; PAM sequence: CTC
acgaggacaggaaatcaaat

SEQ ID NO: 30026 - DNA, 20 bp, Artificial Sequence
  Description of Artificial Sequence: Synthetic oligonucleotide
  Target: COL7A1; (+) strand; PAM type: YTN; PAM sequence: CTT
tagggcacctctactcacca

SEQ ID NO: 30027 - DNA, 20 bp, Artificial Sequence
  Description of Artificial Sequence: Synthetic oligonucleotide
  Target: COL7A1; (+) strand; PAM type: YTN; PAM sequence: TTT
agggcacctctactcaccac

SEQ ID NO: 30028 - DNA, 20 bp, Artificial Sequence
  Description of Artificial Sequence: Synthetic oligonucleotide
  Target: COL7A1; (+) strand; PAM type: YTN; PAM sequence: TTA
gggcacctctactcaccact

SEQ ID NO: 30029 - DNA, 20 bp, Artificial Sequence
  Description of Artificial Sequence: Synthetic oligonucleotide
  Target: COL7A1; (+) strand; PAM type: YTN; PAM sequence: CTC
tactcaccactgaccccggt

SEQ ID NO: 30030 - DNA, 20 bp, Artificial Sequence
  Description of Artificial Sequence: Synthetic oligonucleotide
  Target: COL7A1; (+) strand; PAM type: YTN; PAM sequence: CTA
ctcaccactgaccccggtgg

SEQ ID NO: 30031 - DNA, 20 bp, Artificial Sequence
  Description of Artificial Sequence: Synthetic oligonucleotide
  Target: COL7A1; (+) strand; PAM type: YTN; PAM sequence: CTC
accactgaccccggtggtcc

SEQ ID NO: 30032 - DNA, 20 bp, Artificial Sequence
  Description of Artificial Sequence: Synthetic oligonucleotide
  Target: COL7A1; (+) strand; PAM type: YTN; PAM sequence: CTG
accccggtggtccaggtggc

SEQ ID NO: 30033 - DNA, 20 bp, Artificial Sequence
  Description of Artificial Sequence: Synthetic oligonucleotide
  Target: COL7A1; (+) strand; PAM type: YTN; PAM sequence: CTG
ggattccttctctccctggg

SEQ ID NO: 30034 - DNA, 20 bp, Artificial Sequence
  Description of Artificial Sequence: Synthetic oligonucleotide
  Target: COL7A1; (+) strand; PAM type: YTN; PAM sequence: TTC
cttctctccctggggggcct

SEQ ID NO: 30035 - DNA, 20 bp, Artificial Sequence
  Description of Artificial Sequence: Synthetic oligonucleotide
  Target: COL7A1; (+) strand; PAM type: YTN; PAM sequence: CTT
ctctccctggggggcctgcc

SEQ ID NO: 30036 - DNA, 20 bp, Artificial Sequence
  Description of Artificial Sequence: Synthetic oligonucleotide
  Target: COL7A1; (+) strand; PAM type: YTN; PAM sequence: TTC
tctccctggggggcctgcca

SEQ ID NO: 30037 - DNA, 20 bp, Artificial Sequence
  Description of Artificial Sequence: Synthetic oligonucleotide
  Target: COL7A1; (+) strand; PAM type: YTN; PAM sequence: CTC
tccctggggggcctgccaga

SEQ ID NO: 30038 - DNA, 20 bp, Artificial Sequence
  Description of Artificial Sequence: Synthetic oligonucleotide
  Target: COL7A1; (+) strand; PAM type: YTN; PAM sequence: CTC
cctggggggcctgccagacc

SEQ ID NO: 30039 - DNA, 20 bp, Artificial Sequence
  Description of Artificial Sequence: Synthetic oligonucleotide
  Target: COL7A1; (+) strand; PAM type: YTN; PAM sequence: CTG
gggggcctgccagaccctac

SEQ ID NO: 30040 - DNA, 20 bp, Artificial Sequence
  Description of Artificial Sequence: Synthetic oligonucleotide
  Target: COL7A1; (+) strand; PAM type: YTN; PAM sequence: CTG
ccagaccctaccagaaaaat

SEQ ID NO: 30041 - DNA, 20 bp, Artificial Sequence
  Description of Artificial Sequence: Synthetic oligonucleotide
  Target: COL7A1; (+) strand; PAM type: YTN; PAM sequence: CTA
ccagaaaaatggggcaagag

SEQ ID NO: 30042 - DNA, 20 bp, Artificial Sequence
  Description of Artificial Sequence: Synthetic oligonucleotide
  Target: COL7A1; (+) strand; PAM type: YTN; PAM sequence: CTT
gggaaccctcctaccctctg

SEQ ID NO: 30043 - DNA, 20 bp, Artificial Sequence
  Description of Artificial Sequence: Synthetic oligonucleotide
  Target: COL7A1; (+) strand; PAM type: YTN; PAM sequence: TTG
ggaaccctcctaccctctgc

SEQ ID NO: 30044 - DNA, 20 bp, Artificial Sequence
  Description of Artificial Sequence: Synthetic oligonucleotide
  Target: COL7A1; (+) strand; PAM type: YTN; PAM sequence: CTC
ctaccctctgccccctcaag

SEQ ID NO: 30045 - DNA, 20 bp, Artificial Sequence
  Description of Artificial Sequence: Synthetic oligonucleotide
  Target: COL7A1; (+) strand; PAM type: YTN; PAM sequence: CTA
ccctctgccccctcaagact

SEQ ID NO: 30046 - DNA, 20 bp, Artificial Sequence
  Description of Artificial Sequence: Synthetic oligonucleotide
  Target: COL7A1; (+) strand; PAM type: YTN; PAM sequence: CTC
tgccccctcaagactgggaa

SEQ ID NO: 30047 - DNA, 20 bp, Artificial Sequence
  Description of Artificial Sequence: Synthetic oligonucleotide
  Target: COL7A1; (+) strand; PAM type: YTN; PAM sequence: CTG
ccccctcaagactgggaacc

SEQ ID NO: 30048 - DNA, 20 bp, Artificial Sequence
  Description of Artificial Sequence: Synthetic oligonucleotide
  Target: COL7A1; (+) strand; PAM type: YTN; PAM sequence: CTC
aagactgggaacccccaagg

SEQ ID NO: 30049 - DNA, 20 bp, Artificial Sequence
  Description of Artificial Sequence: Synthetic oligonucleotide
  Target: COL7A1; (+) strand; PAM type: YTN; PAM sequence: CTG
ggaacccccaaggcagggcc

SEQ ID NO: 30050 - DNA, 20 bp, Artificial Sequence
  Description of Artificial Sequence: Synthetic oligonucleotide
  Target: COL7A1; (+) strand; PAM type: YTN; PAM sequence: CTC
ctcacccaccatggattcac

SEQ ID NO: 30051 - DNA, 20 bp, Artificial Sequence
  Description of Artificial Sequence: Synthetic oligonucleotide
  Target: COL7A1; (+) strand; PAM type: YTN; PAM sequence: CTC
acccaccatggattcaccat

SEQ ID NO: 30052 - DNA, 20 bp, Artificial Sequence
  Description of Artificial Sequence: Synthetic oligonucleotide
  Target: COL7A1; (+) strand; PAM type: YTN; PAM sequence: TTC
accatgcccctacatgctgt

SEQ ID NO: 30053 - DNA, 20 bp, Artificial Sequence
  Description of Artificial Sequence: Synthetic oligonucleotide
  Target: COL7A1; (+) strand; PAM type: YTN; PAM sequence: CTA
catgctgttcccagcccctc

SEQ ID NO: 30054 - DNA, 20 bp, Artificial Sequence
  Description of Artificial Sequence: Synthetic oligonucleotide
  Target: COL7A1; (+) strand; PAM type: YTN; PAM sequence: CTG
ttcccagcccctcacccgct

SEQ ID NO: 30055 - DNA, 20 bp, Artificial Sequence
  Description of Artificial Sequence: Synthetic oligonucleotide
  Target: COL7A1; (+) strand; PAM type: YTN; PAM sequence: TTC
ccagcccctcacccgctctc

SEQ ID NO: 30056 - DNA, 20 bp, Artificial Sequence
  Description of Artificial Sequence: Synthetic oligonucleotide
  Target: COL7A1; (+) strand; PAM type: YTN; PAM sequence: CTC
acccgctctccactagggcc

SEQ ID NO: 30057 - DNA, 20 bp, Artificial Sequence
  Description of Artificial Sequence: Synthetic oligonucleotide
  Target: COL7A1; (+) strand; PAM type: YTN; PAM sequence: CTC
tccactagggcctggctgac

SEQ ID NO: 30058 - DNA, 20 bp, Artificial Sequence
  Description of Artificial Sequence: Synthetic oligonucleotide
  Target: COL7A1; (+) strand; PAM type: YTN; PAM sequence: CTC
cactagggcctggctgaccc

SEQ ID NO: 30059 - DNA, 20 bp, Artificial Sequence
  Description of Artificial Sequence: Synthetic oligonucleotide
  Target: COL7A1; (+) strand; PAM type: YTN; PAM sequence: CTA
gggcctggctgacccatctc

SEQ ID NO: 30060 - DNA, 20 bp, Artificial Sequence
  Description of Artificial Sequence: Synthetic oligonucleotide
  Target: COL7A1; (+) strand; PAM type: YTN; PAM sequence: CTG
gctgacccatctctcctcga

SEQ ID NO: 30061 - DNA, 20 bp, Artificial Sequence
  Description of Artificial Sequence: Synthetic oligonucleotide
  Target: COL7A1; (+) strand; PAM type: YTN; PAM sequence: CTG
acccatctctcctcgagggc

SEQ ID NO: 30062 - DNA, 20 bp, Artificial Sequence
  Description of Artificial Sequence: Synthetic oligonucleotide
  Target: COL7A1; (+) strand; PAM type: YTN; PAM sequence: CTC
tcctcgagggcctgtctgac

SEQ ID NO: 30063 - DNA, 20 bp, Artificial Sequence
  Description of Artificial Sequence: Synthetic oligonucleotide
  Target: COL7A1; (+) strand; PAM type: YTN; PAM sequence: CTC
ctcgagggcctgtctgaccc

SEQ ID NO: 30064 - DNA, 20 bp, Artificial Sequence
  Description of Artificial Sequence: Synthetic oligonucleotide
  Target: COL7A1; (+) strand; PAM type: YTN; PAM sequence: CTC
gagggcctgtctgacccggg

SEQ ID NO: 30065 - DNA, 20 bp, Artificial Sequence
  Description of Artificial Sequence: Synthetic oligonucleotide
  Target: COL7A1; (+) strand; PAM type: YTN; PAM sequence: CTG
tctgacccgggaacccaaca

SEQ ID NO: 30066 - DNA, 20 bp, Artificial Sequence
  Description of Artificial Sequence: Synthetic oligonucleotide
  Target: COL7A1; (+) strand; PAM type: YTN; PAM sequence: CTG
acccgggaacccaacaacac

SEQ ID NO: 30067 - DNA, 20 bp, Artificial Sequence
  Description of Artificial Sequence: Synthetic oligonucleotide
  Target: COL7A1; (+) strand; PAM type: YTN; PAM sequence: CTC
cctgaaataaaaacagcaaa

SEQ ID NO: 30068 - DNA, 20 bp, Artificial Sequence
  Description of Artificial Sequence: Synthetic oligonucleotide
  Target: COL7A1; (+) strand; PAM type: YTN; PAM sequence: CTG
aaataaaaacagcaaaggga

SEQ ID NO: 30069 - DNA, 20 bp, Artificial Sequence
  Description of Artificial Sequence: Synthetic oligonucleotide
  Target: COL7A1; (+) strand; PAM type: YTN; PAM sequence: CTC
ccaggactctcatcagaact

SEQ ID NO: 30070 - DNA, 20 bp, Artificial Sequence
  Description of Artificial Sequence: Synthetic oligonucleotide
  Target: COL7A1; (+) strand; PAM type: YTN; PAM sequence: CTC
tcatcagaactccctcttcc

SEQ ID NO: 30071 - DNA, 20 bp, Artificial Sequence
  Description of Artificial Sequence: Synthetic oligonucleotide
  Target: COL7A1; (+) strand; PAM type: YTN; PAM sequence: CTC
atcagaactccctcttcctc

SEQ ID NO: 30072 - DNA, 20 bp, Artificial Sequence
  Description of Artificial Sequence: Synthetic oligonucleotide
  Target: COL7A1; (+) strand; PAM type: YTN; PAM sequence: CTC
cctcttcctcctgtgggggc

SEQ ID NO: 30073 - DNA, 20 bp, Artificial Sequence
  Description of Artificial Sequence: Synthetic oligonucleotide
  Target: COL7A1; (+) strand; PAM type: YTN; PAM sequence: CTC
ttcctcctgtgggggcccgg

SEQ ID NO: 30074 - DNA, 20 bp, Artificial Sequence
  Description of Artificial Sequence: Synthetic oligonucleotide
  Target: COL7A1; (+) strand; PAM type: YTN; PAM sequence: CTT
cctcctgtgggggcccggcc

SEQ ID NO: 30075 - DNA, 20 bp, Artificial Sequence
  Description of Artificial Sequence: Synthetic oligonucleotide
  Target: COL7A1; (+) strand; PAM type: YTN; PAM sequence: TTC
ctcctgtgggggcccggcct

SEQ ID NO: 30076 - DNA, 20 bp, Artificial Sequence
  Description of Artificial Sequence: Synthetic oligonucleotide
  Target: COL7A1; (+) strand; PAM type: YTN; PAM sequence: CTC
ctgtgggggcccggcctgct

SEQ ID NO: 30077 - DNA, 20 bp, Artificial Sequence
  Description of Artificial Sequence: Synthetic oligonucleotide
  Target: COL7A1; (+) strand; PAM type: YTN; PAM sequence: CTG
tgggggcccggcctgctgcc

SEQ ID NO: 30078 - DNA, 20 bp, Artificial Sequence
  Description of Artificial Sequence: Synthetic oligonucleotide
  Target: COL7A1; (+) strand; PAM type: YTN; PAM sequence: CTG
ctgcccctacaactggtgat

SEQ ID NO: 30079 - DNA, 20 bp, Artificial Sequence
  Description of Artificial Sequence: Synthetic oligonucleotide
  Target: COL7A1; (+) strand; PAM type: YTN; PAM sequence: CTG
cccctacaactggtgatggg

SEQ ID NO: 30080 - DNA, 20 bp, Artificial Sequence
  Description of Artificial Sequence: Synthetic oligonucleotide
  Target: COL7A1; (+) strand; PAM type: YTN; PAM sequence: CTA
caactggtgatggggcattg

SEQ ID NO: 30081 - DNA, 20 bp, Artificial Sequence
  Description of Artificial Sequence: Synthetic oligonucleotide
  Target: COL7A1; (+) strand; PAM type: YTN; PAM sequence: CTG
gtgatggggcattgacttac

SEQ ID NO: 30082 - DNA, 20 bp, Artificial Sequence
  Description of Artificial Sequence: Synthetic oligonucleotide
  Target: COL7A1; (+) strand; PAM type: YTN; PAM sequence: TTG
acttaccttcacacctggag

SEQ ID NO: 30083 - DNA, 20 bp, Artificial Sequence
  Description of Artificial Sequence: Synthetic oligonucleotide
  Target: COL7A1; (+) strand; PAM type: YTN; PAM sequence: CTT
accttcacacctggagggcc

SEQ ID NO: 30084 - DNA, 20 bp, Artificial Sequence
  Description of Artificial Sequence: Synthetic oligonucleotide
  Target: COL7A1; (+) strand; PAM type: YTN; PAM sequence: TTA
ccttcacacctggagggcca

SEQ ID NO: 30085 - DNA, 20 bp, Artificial Sequence
  Description of Artificial Sequence: Synthetic oligonucleotide
  Target: COL7A1; (+) strand; PAM type: YTN; PAM sequence: CTT
cacacctggagggccaggag

SEQ ID NO: 30086 - DNA, 20 bp, Artificial Sequence
  Description of Artificial Sequence: Synthetic oligonucleotide
  Target: COL7A1; (+) strand; PAM type: YTN; PAM sequence: TTC
acacctggagggccaggagg

SEQ ID NO: 30087 - DNA, 20 bp, Artificial Sequence
  Description of Artificial Sequence: Synthetic oligonucleotide
  Target: COL7A1; (+) strand; PAM type: YTN; PAM sequence: CTG
gagggccaggaggcccaggg

SEQ ID NO: 30088 - DNA, 20 bp, Artificial Sequence
  Description of Artificial Sequence: Synthetic oligonucleotide
  Target: COL7A1; (+) strand; PAM type: YTN; PAM sequence: CTC
ctgggtcaccctttgaggaa

SEQ ID NO: 30089 - DNA, 20 bp, Artificial Sequence
  Description of Artificial Sequence: Synthetic oligonucleotide
  Target: COL7A1; (+) strand; PAM type: YTN; PAM sequence: CTG
ggtcaccctttgaggaaaag

SEQ ID NO: 30090 - DNA, 20 bp, Artificial Sequence
  Description of Artificial Sequence: Synthetic oligonucleotide
  Target: COL7A1; (+) strand; PAM type: YTN; PAM sequence: CTT
tgaggaaaagaggcatcgga

SEQ ID NO: 30091 - DNA, 20 bp, Artificial Sequence
  Description of Artificial Sequence: Synthetic oligonucleotide
  Target: COL7A1; (+) strand; PAM type: YTN; PAM sequence: TTT
gaggaaaagaggcatcggat

SEQ ID NO: 30092 - DNA, 20 bp, Artificial Sequence
  Description of Artificial Sequence: Synthetic oligonucleotide
  Target: COL7A1; (+) strand; PAM type: YTN; PAM sequence: TTG
aggaaaagaggcatcggatc

SEQ ID NO: 30093 - DNA, 20 bp, Artificial Sequence
  Description of Artificial Sequence: Synthetic oligonucleotide
  Target: COL7A1; (+) strand; PAM type: YTN; PAM sequence: CTC
agggagtctcacgaccagga

SEQ ID NO: 30094 - DNA, 20 bp, Artificial Sequence
  Description of Artificial Sequence: Synthetic oligonucleotide
  Target: COL7A1; (+) strand; PAM type: YTN; PAM sequence: CTC
acgaccaggaccccagcagg

SEQ ID NO: 30095 - DNA, 20 bp, Artificial Sequence
  Description of Artificial Sequence: Synthetic oligonucleotide
  Target: COL7A1; (+) strand; PAM type: YTN; PAM sequence: CTT
ctgggtacacataccttgaa

SEQ ID NO: 30096 - DNA, 20 bp, Artificial Sequence
  Description of Artificial Sequence: Synthetic oligonucleotide
  Target: COL7A1; (+) strand; PAM type: YTN; PAM sequence: TTC
tgggtacacataccttgaaa

SEQ ID NO: 30097 - DNA, 20 bp, Artificial Sequence
  Description of Artificial Sequence: Synthetic oligonucleotide
  Target: COL7A1; (+) strand; PAM type: YTN; PAM sequence: CTG
ggtacacataccttgaaacc

SEQ ID NO: 30098 - DNA, 20 bp, Artificial Sequence
  Description of Artificial Sequence: Synthetic oligonucleotide
  Target: COL7A1; (+) strand; PAM type: YTN; PAM sequence: CTT
gaaacctttgggtcctggag

SEQ ID NO: 30099 - DNA, 20 bp, Artificial Sequence
  Description of Artificial Sequence: Synthetic oligonucleotide
  Target: COL7A1; (+) strand; PAM type: YTN; PAM sequence: TTG
aaacctttgggtcctggagc

SEQ ID NO: 30100 - DNA, 20 bp, Artificial Sequence
  Description of Artificial Sequence: Synthetic oligonucleotide
  Target: COL7A1; (+) strand; PAM type: YTN; PAM sequence: CTT
tgggtcctggagcccctttc

SEQ ID NO: 30101 - DNA, 20 bp, Artificial Sequence
  Description of Artificial Sequence: Synthetic oligonucleotide
  Target: COL7A1; (+) strand; PAM type: YTN; PAM sequence: TTT
gggtcctggagcccctttct

SEQ ID NO: 30102 - DNA, 20 bp, Artificial Sequence
  Description of Artificial Sequence: Synthetic oligonucleotide
  Target: COL7A1; (+) strand; PAM type: YTN; PAM sequence: TTG
ggtcctggagcccctttctg

SEQ ID NO: 30103 - DNA, 20 bp, Artificial Sequence
  Description of Artificial Sequence: Synthetic oligonucleotide
  Target: COL7A1; (+) strand; PAM type: YTN; PAM sequence: CTG
gagcccctttctgaccctaa

SEQ ID NO: 30104 - DNA, 20 bp, Artificial Sequence
  Description of Artificial Sequence: Synthetic oligonucleotide
  Target: COL7A1; (+) strand; PAM type: YTN; PAM sequence: CTT
tctgaccctaagaaaaccca

SEQ ID NO: 30105 - DNA, 20 bp, Artificial Sequence
  Description of Artificial Sequence: Synthetic oligonucleotide
  Target: COL7A1; (+) strand; PAM type: YTN; PAM sequence: TTT
ctgaccctaagaaaacccag

SEQ ID NO: 30106 - DNA, 20 bp, Artificial Sequence
  Description of Artificial Sequence: Synthetic oligonucleotide
  Target: COL7A1; (+) strand; PAM type: YTN; PAM sequence: TTC
tgaccctaagaaaacccagc

SEQ ID NO: 30107 - DNA, 20 bp, Artificial Sequence
  Description of Artificial Sequence: Synthetic oligonucleotide
  Target: COL7A1; (+) strand; PAM type: YTN; PAM sequence: CTG
accctaagaaaacccagcaa

SEQ ID NO: 30108 - DNA, 20 bp, Artificial Sequence
  Description of Artificial Sequence: Synthetic oligonucleotide
  Target: COL7A1; (+) strand; PAM type: YTN; PAM sequence: CTA
agaaaacccagcaaacagca

SEQ ID NO: 30109 - DNA, 20 bp, Artificial Sequence
  Description of Artificial Sequence: Synthetic oligonucleotide
  Target: COL7A1; (+) strand; PAM type: YTN; PAM sequence: TTT
gagagggtaggaacatgagc

SEQ ID NO: 30110 - DNA, 20 bp, Artificial Sequence
  Description of Artificial Sequence: Synthetic oligonucleotide
  Target: COL7A1; (+) strand; PAM type: YTN; PAM sequence: TTG
agagggtaggaacatgagca

SEQ ID NO: 30111 - DNA, 20 bp, Artificial Sequence
  Description of Artificial Sequence: Synthetic oligonucleotide
  Target: COL7A1; (+) strand; PAM type: YTN; PAM sequence: TTC
agacacgggctgaaaatatt

SEQ ID NO: 30112 - DNA, 20 bp, Artificial Sequence
  Description of Artificial Sequence: Synthetic oligonucleotide
  Target: COL7A1; (+) strand; PAM type: YTN; PAM sequence: CTG
aaaatattcccaggggagtt

SEQ ID NO: 30113 - DNA, 20 bp, Artificial Sequence
  Description of Artificial Sequence: Synthetic oligonucleotide
  Target: COL7A1; (+) strand; PAM type: YTN; PAM sequence: TTC
ccaggggagttctgatgtga

SEQ ID NO: 30114 - DNA, 20 bp, Artificial Sequence
  Description of Artificial Sequence: Synthetic oligonucleotide
  Target: COL7A1; (+) strand; PAM type: YTN; PAM sequence: TTC
tgatgtgaccatgaacacat

SEQ ID NO: 30115 - DNA, 20 bp, Artificial Sequence
  Description of Artificial Sequence: Synthetic oligonucleotide
  Target: COL7A1; (+) strand; PAM type: YTN; PAM sequence: CTG
atgtgaccatgaacacatgg

SEQ ID NO: 30116 - DNA, 20 bp, Artificial Sequence
  Description of Artificial Sequence: Synthetic oligonucleotide
  Target: COL7A1; (+) strand; PAM type: YTN; PAM sequence: CTC
agacatgcgaccaagaattg

SEQ ID NO: 30117 - DNA, 20 bp, Artificial Sequence
  Description of Artificial Sequence: Synthetic oligonucleotide
  Target: COL7A1; (+) strand; PAM type: YTN; PAM sequence: TTG
gctcacaggagctcagacat

SEQ ID NO: 30118 - DNA, 20 bp, Artificial Sequence
  Description of Artificial Sequence: Synthetic oligonucleotide
  Target: COL7A1; (+) strand; PAM type: YTN; PAM sequence: CTC
acaggagctcagacatgacc

SEQ ID NO: 30119 - DNA, 20 bp, Artificial Sequence
  Description of Artificial Sequence: Synthetic oligonucleotide
  Target: COL7A1; (+) strand; PAM type: YTN; PAM sequence: CTC
agacatgaccatggcctatc

SEQ ID NO: 30120 - DNA, 20 bp, Artificial Sequence
  Description of Artificial Sequence: Synthetic oligonucleotide
  Target: COL7A1; (+) strand; PAM type: YTN; PAM sequence: CTA
tctcaggacagcacagacag

SEQ ID NO: 30121 - DNA, 20 bp, Artificial Sequence
  Description of Artificial Sequence: Synthetic oligonucleotide
  Target: COL7A1; (+) strand; PAM type: YTN; PAM sequence: CTC
aggacagcacagacagaggg

SEQ ID NO: 30122 - DNA, 20 bp, Artificial Sequence
  Description of Artificial Sequence: Synthetic oligonucleotide
  Target: COL7A1; (+) strand; PAM type: YTN; PAM sequence: CTC
agatactaccatagacaggt

SEQ ID NO: 30123 - DNA, 20 bp, Artificial Sequence
  Description of Artificial Sequence: Synthetic oligonucleotide
  Target: COL7A1; (+) strand; PAM type: YTN; PAM sequence: CTA
ccatagacaggtgggagttc

SEQ ID NO: 30124 - DNA, 20 bp, Artificial Sequence
  Description of Artificial Sequence: Synthetic oligonucleotide
  Target: COL7A1; (+) strand; PAM type: YTN; PAM sequence: TTC
aggcatggcacaggcacagg

SEQ ID NO: 30125 - DNA, 20 bp, Artificial Sequence
  Description of Artificial Sequence: Synthetic oligonucleotide
  Target: COL7A1; (+) strand; PAM type: YTN; PAM sequence: CTG
gctccacagacgtgagtgcg

SEQ ID NO: 30126 - DNA, 20 bp, Artificial Sequence
  Description of Artificial Sequence: Synthetic oligonucleotide
  Target: COL7A1; (+) strand; PAM type: YTN; PAM sequence: CTC
cacagacgtgagtgcggaca

SEQ ID NO: 30127 - DNA, 20 bp, Artificial Sequence
  Description of Artificial Sequence: Synthetic oligonucleotide
  Target: COL7A1; (+) strand; PAM type: YTN; PAM sequence: CTC
agaggggaaccccaacacgt

SEQ ID NO: 30128 - DNA, 20 bp, Artificial Sequence
  Description of Artificial Sequence: Synthetic oligonucleotide
  Target: COL7A1; (+) strand; PAM type: YTN; PAM sequence: CTC
ccgggtagagcaggcatggc

SEQ ID NO: 30129 - DNA, 20 bp, Artificial Sequence
  Description of Artificial Sequence: Synthetic oligonucleotide
  Target: COL7A1; (+) strand; PAM type: YTN; PAM sequence: CTG
aacgctggcagccaggggca

SEQ ID NO: 30130 - DNA, 20 bp, Artificial Sequence
  Description of Artificial Sequence: Synthetic oligonucleotide
  Target: COL7A1; (+) strand; PAM type: YTN; PAM sequence: CTG
gcagccaggggcaggggaaa

SEQ ID NO: 30131 - DNA, 20 bp, Artificial Sequence
  Description of Artificial Sequence: Synthetic oligonucleotide
  Target: COL7A1; (+) strand; PAM type: YTN; PAM sequence: TTG
taaacacaggaccaaggaga

SEQ ID NO: 30132 - DNA, 20 bp, Artificial Sequence
  Description of Artificial Sequence: Synthetic oligonucleotide
  Target: COL7A1; (+) strand; PAM type: YTN; PAM sequence: TTC
acaagaactcaggtgtgtcc

SEQ ID NO: 30133 - DNA, 20 bp, Artificial Sequence
  Description of Artificial Sequence: Synthetic oligonucleotide
  Target: COL7A1; (+) strand; PAM type: YTN; PAM sequence: CTC
aggtgtgtcctgggatctgg

SEQ ID NO: 30134 - DNA, 20 bp, Artificial Sequence
  Description of Artificial Sequence: Synthetic oligonucleotide
  Target: COL7A1; (+) strand; PAM type: YTN; PAM sequence: CTG
ggatctgggagatcagacca

SEQ ID NO: 30135 - DNA, 20 bp, Artificial Sequence
  Description of Artificial Sequence: Synthetic oligonucleotide
  Target: COL7A1; (+) strand; PAM type: YTN; PAM sequence: CTG
ggagatcagaccagagcaca

SEQ ID NO: 30136 - DNA, 20 bp, Artificial Sequence
  Description of Artificial Sequence: Synthetic oligonucleotide
  Target: COL7A1; (+) strand; PAM type: YTN; PAM sequence: CTC
agagtgtggaagccgacagt

SEQ ID NO: 30137 - DNA, 20 bp, Artificial Sequence
  Description of Artificial Sequence: Synthetic oligonucleotide
  Target: COL7A1; (+) strand; PAM type: YTN; PAM sequence: CTC
cctgtgatccagagagcagg

SEQ ID NO: 30138 - DNA, 20 bp, Artificial Sequence
  Description of Artificial Sequence: Synthetic oligonucleotide
  Target: COL7A1; (+) strand; PAM type: YTN; PAM sequence: CTG
tgatccagagagcaggctcc

SEQ ID NO: 30139 - DNA, 20 bp, Artificial Sequence
  Description of Artificial Sequence: Synthetic oligonucleotide
  Target: COL7A1; (+) strand; PAM type: YTN; PAM sequence: CTC
ctggatgttgggacatgcag

SEQ ID NO: 30140 - DNA, 20 bp, Artificial Sequence
  Description of Artificial Sequence: Synthetic oligonucleotide
  Target: COL7A1; (+) strand; PAM type: YTN; PAM sequence: CTG
gatgttgggacatgcagccc

SEQ ID NO: 30141 - DNA, 20 bp, Artificial Sequence
  Description of Artificial Sequence: Synthetic oligonucleotide
  Target: COL7A1; (+) strand; PAM type: YTN; PAM sequence: TTG
ggacatgcagcccgactcag

SEQ ID NO: 30142 - DNA, 20 bp, Artificial Sequence
  Description of Artificial Sequence: Synthetic oligonucleotide
  Target: COL7A1; (+) strand; PAM type: YTN; PAM sequence: CTC
aggggctcagacatgtgccc

SEQ ID NO: 30143 - DNA, 20 bp, Artificial Sequence
  Description of Artificial Sequence: Synthetic oligonucleotide
  Target: COL7A1; (+) strand; PAM type: YTN; PAM sequence: CTC
agacatgtgccccggcccaa

SEQ ID NO: 30144 - DNA, 20 bp, Artificial Sequence
  Description of Artificial Sequence: Synthetic oligonucleotide
  Target: COL7A1; (+) strand; PAM type: YTN; PAM sequence: CTT
atgcccgccatcacactcct

SEQ ID NO: 30145 - DNA, 20 bp, Artificial Sequence
  Description of Artificial Sequence: Synthetic oligonucleotide
  Target: COL7A1; (+) strand; PAM type: YTN; PAM sequence: TTA
tgcccgccatcacactcctc

SEQ ID NO: 30146 - DNA, 20 bp, Artificial Sequence
  Description of Artificial Sequence: Synthetic oligonucleotide
  Target: COL7A1; (+) strand; PAM type: YTN; PAM sequence: CTC
ctcaggccaggctcgccctt

SEQ ID NO: 30147 - DNA, 20 bp, Artificial Sequence
  Description of Artificial Sequence: Synthetic oligonucleotide
  Target: COL7A1; (+) strand; PAM type: YTN; PAM sequence: CTC
aggccaggctcgcccttgcc

SEQ ID NO: 30148 - DNA, 20 bp, Artificial Sequence
  Description of Artificial Sequence: Synthetic oligonucleotide
  Target: COL7A1; (+) strand; PAM type: YTN; PAM sequence: CTC
gcccttgcctaggccccgga

SEQ ID NO: 30149 - DNA, 20 bp, Artificial Sequence
  Description of Artificial Sequence: Synthetic oligonucleotide
  Target: COL7A1; (+) strand; PAM type: YTN; PAM sequence: CTT
gcctaggccccggactcaca

SEQ ID NO: 30150 - DNA, 20 bp, Artificial Sequence
  Description of Artificial Sequence: Synthetic oligonucleotide
  Target: COL7A1; (+) strand; PAM type: YTN; PAM sequence: TTG
cctaggccccggactcacat

SEQ ID NO: 30151 - DNA, 20 bp, Artificial Sequence
  Description of Artificial Sequence: Synthetic oligonucleotide
  Target: COL7A1; (+) strand; PAM type: YTN; PAM sequence: CTA
ggccccggactcacatcttc

SEQ ID NO: 30152 - DNA, 20 bp, Artificial Sequence
  Description of Artificial Sequence: Synthetic oligonucleotide
  Target: COL7A1; (+) strand; PAM type: YTN; PAM sequence: CTC
acatcttccccagggtctcc

SEQ ID NO: 30153 - DNA, 20 bp, Artificial Sequence
  Description of Artificial Sequence: Synthetic oligonucleotide
  Target: COL7A1; (+) strand; PAM type: YTN; PAM sequence: CTT
ccccagggtctccgggctcc

SEQ ID NO: 30154 - DNA, 20 bp, Artificial Sequence
  Description of Artificial Sequence: Synthetic oligonucleotide
  Target: COL7A1; (+) strand; PAM type: YTN; PAM sequence: TTC
cccagggtctccgggctccc

SEQ ID NO: 30155 - DNA, 20 bp, Artificial Sequence
  Description of Artificial Sequence: Synthetic oligonucleotide
  Target: COL7A1; (+) strand; PAM type: YTN; PAM sequence: CTC
cgggctcccctgcacggcca

SEQ ID NO: 30156 - DNA, 20 bp, Artificial Sequence
  Description of Artificial Sequence: Synthetic oligonucleotide
  Target: COL7A1; (+) strand; PAM type: YTN; PAM sequence: CTC
ccctgcacggccagcttcac

SEQ ID NO: 30157 - DNA, 20 bp, Artificial Sequence
  Description of Artificial Sequence: Synthetic oligonucleotide
  Target: COL7A1; (+) strand; PAM type: YTN; PAM sequence: CTG
cacggccagcttcaccctgc

SEQ ID NO: 30158 - DNA, 20 bp, Artificial Sequence
  Description of Artificial Sequence: Synthetic oligonucleotide
  Target: COL7A1; (+) strand; PAM type: YTN; PAM sequence: CTT
caccctgcacagaatggcag

SEQ ID NO: 30159 - DNA, 20 bp, Artificial Sequence
  Description of Artificial Sequence: Synthetic oligonucleotide
  Target: COL7A1; (+) strand; PAM type: YTN; PAM sequence: TTC
accctgcacagaatggcagg

SEQ ID NO: 30160 - DNA, 20 bp, Artificial Sequence
  Description of Artificial Sequence: Synthetic oligonucleotide
  Target: COL7A1; (+) strand; PAM type: YTN; PAM sequence: CTG
cacagaatggcaggtgaggg

SEQ ID NO: 30161 - DNA, 20 bp, Artificial Sequence
  Description of Artificial Sequence: Synthetic oligonucleotide
  Target: COL7A1; (+) strand; PAM type: YTN; PAM sequence: CTG
gactgagccttctctgctca

SEQ ID NO: 30162 - DNA, 20 bp, Artificial Sequence
  Description of Artificial Sequence: Synthetic oligonucleotide
  Target: COL7A1; (+) strand; PAM type: YTN; PAM sequence: CTG
agccttctctgctcagtagt

SEQ ID NO: 30163 - DNA, 20 bp, Artificial Sequence
  Description of Artificial Sequence: Synthetic oligonucleotide
  Target: COL7A1; (+) strand; PAM type: YTN; PAM sequence: CTT
ctctgctcagtagtcaggcc

SEQ ID NO: 30164 - DNA, 20 bp, Artificial Sequence
  Description of Artificial Sequence: Synthetic oligonucleotide
  Target: COL7A1; (+) strand; PAM type: YTN; PAM sequence: TTC
tctgctcagtagtcaggccc

SEQ ID NO: 30165 - DNA, 20 bp, Artificial Sequence
  Description of Artificial Sequence: Synthetic oligonucleotide
  Target: COL7A1; (+) strand; PAM type: YTN; PAM sequence: CTC
tgctcagtagtcaggcccca

SEQ ID NO: 30166 - DNA, 20 bp, Artificial Sequence
  Description of Artificial Sequence: Synthetic oligonucleotide
  Target: COL7A1; (+) strand; PAM type: YTN; PAM sequence: CTG
ctcagtagtcaggccccagg

SEQ ID NO: 30167 - DNA, 20 bp, Artificial Sequence
  Description of Artificial Sequence: Synthetic oligonucleotide
  Target: COL7A1; (+) strand; PAM type: YTN; PAM sequence: CTC
agtagtcaggccccagggcc

SEQ ID NO: 30168 - DNA, 20 bp, Artificial Sequence
  Description of Artificial Sequence: Synthetic oligonucleotide
  Target: COL7A1; (+) strand; PAM type: YTN; PAM sequence: CTC
accttctcgcctcgcggccc

SEQ ID NO: 30169 - DNA, 20 bp, Artificial Sequence
  Description of Artificial Sequence: Synthetic oligonucleotide
  Target: COL7A1; (+) strand; PAM type: YTN; PAM sequence: CTT
ctcgcctcgcggccctggca

SEQ ID NO: 30170 - DNA, 20 bp, Artificial Sequence
  Description of Artificial Sequence: Synthetic oligonucleotide
  Target: COL7A1; (+) strand; PAM type: YTN; PAM sequence: TTC
tcgcctcgcggccctggcag

SEQ ID NO: 30171 - DNA, 20 bp, Artificial Sequence
  Description of Artificial Sequence: Synthetic oligonucleotide
  Target: COL7A1; (+) strand; PAM type: YTN; PAM sequence: CTC
gcctcgcggccctggcagtc

SEQ ID NO: 30172 - DNA, 20 bp, Artificial Sequence
  Description of Artificial Sequence: Synthetic oligonucleotide
  Target: COL7A1; (+) strand; PAM type: YTN; PAM sequence: CTC
gcggccctggcagtcctcgg

SEQ ID NO: 30173 - DNA, 20 bp, Artificial Sequence
  Description of Artificial Sequence: Synthetic oligonucleotide
  Target: COL7A1; (+) strand; PAM type: YTN; PAM sequence: CTG
gcagtcctcggtcacctttg

SEQ ID NO: 30174 - DNA, 20 bp, Artificial Sequence
  Description of Artificial Sequence: Synthetic oligonucleotide
  Target: COL7A1; (+) strand; PAM type: YTN; PAM sequence: CTC
ggtcacctttggctccctgt

SEQ ID NO: 30175 - DNA, 20 bp, Artificial Sequence
  Description of Artificial Sequence: Synthetic oligonucleotide
  Target: COL7A1; (+) strand; PAM type: YTN; PAM sequence: CTT
tggctccctgttgacagagg

SEQ ID NO: 30176 - DNA, 20 bp, Artificial Sequence
  Description of Artificial Sequence: Synthetic oligonucleotide
  Target: COL7A1; (+) strand; PAM type: YTN; PAM sequence: TTT
ggctccctgttgacagaggt

SEQ ID NO: 30177 - DNA, 20 bp, Artificial Sequence
  Description of Artificial Sequence: Synthetic oligonucleotide
  Target: COL7A1; (+) strand; PAM type: YTN; PAM sequence: TTG
gctccctgttgacagaggtc

SEQ ID NO: 30178 - DNA, 20 bp, Artificial Sequence
  Description of Artificial Sequence: Synthetic oligonucleotide
  Target: COL7A1; (+) strand; PAM type: YTN; PAM sequence: CTC
cctgttgacagaggtcagga

SEQ ID NO: 30179 - DNA, 20 bp, Artificial Sequence
  Description of Artificial Sequence: Synthetic oligonucleotide
  Target: COL7A1; (+) strand; PAM type: YTN; PAM sequence: CTG
ttgacagaggtcaggaggca

SEQ ID NO: 30180 - DNA, 20 bp, Artificial Sequence
  Description of Artificial Sequence: Synthetic oligonucleotide
  Target: COL7A1; (+) strand; PAM type: YTN; PAM sequence: TTG
acagaggtcaggaggcaaca

SEQ ID NO: 30181 - DNA, 20 bp, Artificial Sequence
  Description of Artificial Sequence: Synthetic oligonucleotide
  Target: COL7A1; (+) strand; PAM type: YTN; PAM sequence: CTC
cggagggaggcatggggcca

SEQ ID NO: 30182 - DNA, 20 bp, Artificial Sequence
  Description of Artificial Sequence: Synthetic oligonucleotide
  Target: COL7A1; (+) strand; PAM type: YTN; PAM sequence: CTT
aaatatgcggtctactatga

SEQ ID NO: 30183 - DNA, 20 bp, Artificial Sequence
  Description of Artificial Sequence: Synthetic oligonucleotide
  Target: COL7A1; (+) strand; PAM type: YTN; PAM sequence: TTA
aatatgcggtctactatgaa

SEQ ID NO: 30184 - DNA, 20 bp, Artificial Sequence
  Description of Artificial Sequence: Synthetic oligonucleotide
  Target: COL7A1; (+) strand; PAM type: YTN; PAM sequence: CTA
ctatgaaagctgagggtcat

SEQ ID NO: 30185 - DNA, 20 bp, Artificial Sequence
  Description of Artificial Sequence: Synthetic oligonucleotide
  Target: COL7A1; (+) strand; PAM type: YTN; PAM sequence: CTA
tgaaagctgagggtcatgag

SEQ ID NO: 30186 - DNA, 20 bp, Artificial Sequence
  Description of Artificial Sequence: Synthetic oligonucleotide
  Target: COL7A1; (+) strand; PAM type: YTN; PAM sequence: CTG
agggtcatgagggtgggtaa

SEQ ID NO: 30187 - DNA, 20 bp, Artificial Sequence
  Description of Artificial Sequence: Synthetic oligonucleotide
  Target: COL7A1; (+) strand; PAM type: YTN; PAM sequence: CTA
tgggtcgaaggtcagaagtt

SEQ ID NO: 30188 - DNA, 20 bp, Artificial Sequence
  Description of Artificial Sequence: Synthetic oligonucleotide
  Target: COL7A1; (+) strand; PAM type: YTN; PAM sequence: TTA
ggccactggagagacaggac

SEQ ID NO: 30189 - DNA, 20 bp, Artificial Sequence
  Description of Artificial Sequence: Synthetic oligonucleotide
  Target: COL7A1; (+) strand; PAM type: YTN; PAM sequence: CTG
gagagacaggacccccagaa

SEQ ID NO: 30190 - DNA, 20 bp, Artificial Sequence
  Description of Artificial Sequence: Synthetic oligonucleotide
  Target: COL7A1; (+) strand; PAM type: YTN; PAM sequence: CTG
ctgtcagaagttccctactt

SEQ ID NO: 30191 - DNA, 20 bp, Artificial Sequence
  Description of Artificial Sequence: Synthetic oligonucleotide
  Target: COL7A1; (+) strand; PAM type: YTN; PAM sequence: CTG
tcagaagttccctacttacc

SEQ ID NO: 30192 - DNA, 20 bp, Artificial Sequence
  Description of Artificial Sequence: Synthetic oligonucleotide
  Target: COL7A1; (+) strand; PAM type: YTN; PAM sequence: TTC
cctacttaccggctcaccca

SEQ ID NO: 30193 - DNA, 20 bp, Artificial Sequence
  Description of Artificial Sequence: Synthetic oligonucleotide
  Target: COL7A1; (+) strand; PAM type: YTN; PAM sequence: CTA
cttaccggctcacccaccag

SEQ ID NO: 30194 - DNA, 20 bp, Artificial Sequence
  Description of Artificial Sequence: Synthetic oligonucleotide
  Target: COL7A1; (+) strand; PAM type: YTN; PAM sequence: CTT
accggctcacccaccaggtc

SEQ ID NO: 30195 - DNA, 20 bp, Artificial Sequence
  Description of Artificial Sequence: Synthetic oligonucleotide
  Target: COL7A1; (+) strand; PAM type: YTN; PAM sequence: TTA
ccggctcacccaccaggtct

SEQ ID NO: 30196 - DNA, 20 bp, Artificial Sequence
  Description of Artificial Sequence: Synthetic oligonucleotide
  Target: COL7A1; (+) strand; PAM type: YTN; PAM sequence: CTC
acccaccaggtctccagcaa

SEQ ID NO: 30197 - DNA, 20 bp, Artificial Sequence
  Description of Artificial Sequence: Synthetic oligonucleotide
  Target: COL7A1; (+) strand; PAM type: YTN; PAM sequence: CTC
cagcaaggcctccaggggct

SEQ ID NO: 30198 - DNA, 20 bp, Artificial Sequence
  Description of Artificial Sequence: Synthetic oligonucleotide
  Target: COL7A1; (+) strand; PAM type: YTN; PAM sequence: CTC
caggggctccctggtaaggg

SEQ ID NO: 30199 - DNA, 20 bp, Artificial Sequence
  Description of Artificial Sequence: Synthetic oligonucleotide
  Target: COL7A1; (+) strand; PAM type: YTN; PAM sequence: CTC
cctggtaagggggagaggtc

SEQ ID NO: 30200 - DNA, 20 bp, Artificial Sequence
  Description of Artificial Sequence: Synthetic oligonucleotide
  Target: COL7A1; (+) strand; PAM type: YTN; PAM sequence: CTG
gtaagggggagaggtcagtg

SEQ ID NO: 30201 - DNA, 20 bp, Artificial Sequence
  Description of Artificial Sequence: Synthetic oligonucleotide
  Target: COL7A1; (+) strand; PAM type: YTN; PAM sequence: TTC
cttggcccccaccagttgac

SEQ ID NO: 30202 - DNA, 20 bp, Artificial Sequence
  Description of Artificial Sequence: Synthetic oligonucleotide
  Target: COL7A1; (+) strand; PAM type: YTN; PAM sequence: CTT
ggcccccaccagttgacccc

SEQ ID NO: 30203 - DNA, 20 bp, Artificial Sequence
  Description of Artificial Sequence: Synthetic oligonucleotide
  Target: COL7A1; (+) strand; PAM type: YTN; PAM sequence: TTG
gcccccaccagttgaccccc

SEQ ID NO: 30204 - DNA, 20 bp, Artificial Sequence
  Description of Artificial Sequence: Synthetic oligonucleotide
  Target: COL7A1; (+) strand; PAM type: YTN; PAM sequence: TTG
accccccctcactggcagcc

SEQ ID NO: 30205 - DNA, 20 bp, Artificial Sequence
  Description of Artificial Sequence: Synthetic oligonucleotide
  Target: COL7A1; (+) strand; PAM type: YTN; PAM sequence: CTC
actggcagccccacacacac

SEQ ID NO: 30206 - DNA, 20 bp, Artificial Sequence
  Description of Artificial Sequence: Synthetic oligonucleotide
  Target: COL7A1; (+) strand; PAM type: YTN; PAM sequence: CTG
gcagccccacacacactcac

SEQ ID NO: 30207 - DNA, 20 bp, Artificial Sequence
  Description of Artificial Sequence: Synthetic oligonucleotide
  Target: COL7A1; (+) strand; PAM type: YTN; PAM sequence: CTC
accttctctccctttgctcc

SEQ ID NO: 30208 - DNA, 20 bp, Artificial Sequence
  Description of Artificial Sequence: Synthetic oligonucleotide
  Target: COL7A1; (+) strand; PAM type: YTN; PAM sequence: CTT
ctctccctttgctccaggga

SEQ ID NO: 30209 - DNA, 20 bp, Artificial Sequence
  Description of Artificial Sequence: Synthetic oligonucleotide
  Target: COL7A1; (+) strand; PAM type: YTN; PAM sequence: TTC
tctccctttgctccagggag

SEQ ID NO: 30210 - DNA, 20 bp, Artificial Sequence
  Description of Artificial Sequence: Synthetic oligonucleotide
  Target: COL7A1; (+) strand; PAM type: YTN; PAM sequence: CTC
tccctttgctccagggagcc

SEQ ID NO: 30211 - DNA, 20 bp, Artificial Sequence
  Description of Artificial Sequence: Synthetic oligonucleotide
  Target: COL7A1; (+) strand; PAM type: YTN; PAM sequence: CTC
cctttgctccagggagcccg

SEQ ID NO: 30212 - DNA, 20 bp, Artificial Sequence
  Description of Artificial Sequence: Synthetic oligonucleotide
  Target: COL7A1; (+) strand; PAM type: YTN; PAM sequence: CTT
tgctccagggagcccgacca

SEQ ID NO: 30213 - DNA, 20 bp, Artificial Sequence
  Description of Artificial Sequence: Synthetic oligonucleotide
  Target: COL7A1; (+) strand; PAM type: YTN; PAM sequence: TTT
gctccagggagcccgaccac

SEQ ID NO: 30214 - DNA, 20 bp, Artificial Sequence
  Description of Artificial Sequence: Synthetic oligonucleotide
  Target: COL7A1; (+) strand; PAM type: YTN; PAM sequence: TTG
ctccagggagcccgaccaca

SEQ ID NO: 30215 - DNA, 20 bp, Artificial Sequence
  Description of Artificial Sequence: Synthetic oligonucleotide
  Target: COL7A1; (+) strand; PAM type: YTN; PAM sequence: CTC
cagggagcccgaccacagcc

SEQ ID NO: 30216 - DNA, 20 bp, Artificial Sequence
  Description of Artificial Sequence: Synthetic oligonucleotide
  Target: COL7A1; (+) strand; PAM type: YTN; PAM sequence: CTG
tggggaatgctagtgagttt

SEQ ID NO: 30217 - DNA, 20 bp, Artificial Sequence
  Description of Artificial Sequence: Synthetic oligonucleotide
  Target: COL7A1; (+) strand; PAM type: YTN; PAM sequence: CTA
gtgagtttcctcctcctccc

SEQ ID NO: 30218 - DNA, 20 bp, Artificial Sequence
  Description of Artificial Sequence: Synthetic oligonucleotide
  Target: COL7A1; (+) strand; PAM type: YTN; PAM sequence: TTT
cctcctcctcccccgccccc

SEQ ID NO: 30219 - DNA, 20 bp, Artificial Sequence
  Description of Artificial Sequence: Synthetic oligonucleotide
  Target: COL7A1; (+) strand; PAM type: YTN; PAM sequence: TTC
ctcctcctcccccgccccca

SEQ ID NO: 30220 - DNA, 20 bp, Artificial Sequence
  Description of Artificial Sequence: Synthetic oligonucleotide
  Target: COL7A1; (+) strand; PAM type: YTN; PAM sequence: CTC
ctcctcccccgcccccaccc

SEQ ID NO: 30221 - DNA, 20 bp, Artificial Sequence
  Description of Artificial Sequence: Synthetic oligonucleotide
  Target: COL7A1; (+) strand; PAM type: YTN; PAM sequence: CTC
ctcccccgcccccaccctgc

SEQ ID NO: 30222 - DNA, 20 bp, Artificial Sequence
  Description of Artificial Sequence: Synthetic oligonucleotide
  Target: COL7A1; (+) strand; PAM type: YTN; PAM sequence: CTC
ccccgcccccaccctgccac

SEQ ID NO: 30223 - DNA, 20 bp, Artificial Sequence
  Description of Artificial Sequence: Synthetic oligonucleotide
  Target: COL7A1; (+) strand; PAM type: YTN; PAM sequence: CTG
ccacccccatggcatttgga

SEQ ID NO: 30224 - DNA, 20 bp, Artificial Sequence
  Description of Artificial Sequence: Synthetic oligonucleotide
  Target: COL7A1; (+) strand; PAM type: YTN; PAM sequence: TTT
ggaaacaggcttgtgggtga

SEQ ID NO: 30225 - DNA, 20 bp, Artificial Sequence
  Description of Artificial Sequence: Synthetic oligonucleotide
  Target: COL7A1; (+) strand; PAM type: YTN; PAM sequence: TTG
gaaacaggcttgtgggtgag

SEQ ID NO: 30226 - DNA, 20 bp, Artificial Sequence
  Description of Artificial Sequence: Synthetic oligonucleotide
  Target: COL7A1; (+) strand; PAM type: YTN; PAM sequence: CTT
gtgggtgaggcagaggagtt

SEQ ID NO: 30227 - DNA, 20 bp, Artificial Sequence
  Description of Artificial Sequence: Synthetic oligonucleotide
  Target: COL7A1; (+) strand; PAM type: YTN; PAM sequence: TTG
tgggtgaggcagaggagttg

SEQ ID NO: 30228 - DNA, 20 bp, Artificial Sequence
  Description of Artificial Sequence: Synthetic oligonucleotide
  Target: COL7A1; (+) strand; PAM type: YTN; PAM sequence: TTG
ctgcagggggtggaagtcag

SEQ ID NO: 30229 - DNA, 20 bp, Artificial Sequence
  Description of Artificial Sequence: Synthetic oligonucleotide
  Target: COL7A1; (+) strand; PAM type: YTN; PAM sequence: CTG
cagggggtggaagtcagggt

SEQ ID NO: 30230 - DNA, 20 bp, Artificial Sequence
  Description of Artificial Sequence: Synthetic oligonucleotide
  Target: COL7A1; (+) strand; PAM type: YTN; PAM sequence: CTG
tccaggggcccccgtggggc

SEQ ID NO: 30231 - DNA, 20 bp, Artificial Sequence
  Description of Artificial Sequence: Synthetic oligonucleotide
  Target: COL7A1; (+) strand; PAM type: YTN; PAM sequence: TTC
tcctttaggtccgacagggc

SEQ ID NO: 30232 - DNA, 20 bp, Artificial Sequence
  Description of Artificial Sequence: Synthetic oligonucleotide
  Target: COL7A1; (+) strand; PAM type: YTN; PAM sequence: CTC
ctttaggtccgacagggcca

SEQ ID NO: 30233 - DNA, 20 bp, Artificial Sequence
  Description of Artificial Sequence: Synthetic oligonucleotide
  Target: COL7A1; (+) strand; PAM type: YTN; PAM sequence: CTT
taggtccgacagggccaggc

SEQ ID NO: 30234 - DNA, 20 bp, Artificial Sequence
  Description of Artificial Sequence: Synthetic oligonucleotide
  Target: COL7A1; (+) strand; PAM type: YTN; PAM sequence: TTT
aggtccgacagggccaggca

SEQ ID NO: 30235 - DNA, 20 bp, Artificial Sequence
  Description of Artificial Sequence: Synthetic oligonucleotide
  Target: COL7A1; (+) strand; PAM type: YTN; PAM sequence: TTA
ggtccgacagggccaggcag

SEQ ID NO: 30236 - DNA, 20 bp, Artificial Sequence
  Description of Artificial Sequence: Synthetic oligonucleotide
  Target: COL7A1; (+) strand; PAM type: YTN; PAM sequence: CTG
gtgacccctatggcagagca

SEQ ID NO: 30237 - DNA, 20 bp, Artificial Sequence
  Description of Artificial Sequence: Synthetic oligonucleotide
  Target: COL7A1; (+) strand; PAM type: YTN; PAM sequence: CTA
tggcagagcagcgtgaggaa

SEQ ID NO: 30238 - DNA, 20 bp, Artificial Sequence
  Description of Artificial Sequence: Synthetic oligonucleotide
  Target: COL7A1; (+) strand; PAM type: YTN; PAM sequence: CTC
agtgcctctccaccaccacc

SEQ ID NO: 30239 - DNA, 20 bp, Artificial Sequence
  Description of Artificial Sequence: Synthetic oligonucleotide
  Target: COL7A1; (+) strand; PAM type: YTN; PAM sequence: CTC
tccaccaccacccctgctgc

SEQ ID NO: 30240 - DNA, 20 bp, Artificial Sequence
  Description of Artificial Sequence: Synthetic oligonucleotide
  Target: COL7A1; (+) strand; PAM type: YTN; PAM sequence: CTC
caccaccacccctgctgccc

SEQ ID NO: 30241 - DNA, 20 bp, Artificial Sequence
  Description of Artificial Sequence: Synthetic oligonucleotide
  Target: COL7A1; (+) strand; PAM type: YTN; PAM sequence: CTG
ctgccccactcctcatattt

SEQ ID NO: 30242 - DNA, 20 bp, Artificial Sequence
  Description of Artificial Sequence: Synthetic oligonucleotide
  Target: COL7A1; (+) strand; PAM type: YTN; PAM sequence: CTG
ccccactcctcatatttcag

SEQ ID NO: 30243 - DNA, 20 bp, Artificial Sequence
  Description of Artificial Sequence: Synthetic oligonucleotide
  Target: COL7A1; (+) strand; PAM type: YTN; PAM sequence: CTC
ctcatatttcaggcccacag

SEQ ID NO: 30244 - DNA, 20 bp, Artificial Sequence
  Description of Artificial Sequence: Synthetic oligonucleotide
  Target: COL7A1; (+) strand; PAM type: YTN; PAM sequence: CTC
atatttcaggcccacagctg

SEQ ID NO: 30245 - DNA, 20 bp, Artificial Sequence
  Description of Artificial Sequence: Synthetic oligonucleotide
  Target: COL7A1; (+) strand; PAM type: YTN; PAM sequence: TTT
caggcccacagctgggcacc

SEQ ID NO: 30246 - DNA, 20 bp, Artificial Sequence
  Description of Artificial Sequence: Synthetic oligonucleotide
  Target: COL7A1; (+) strand; PAM type: YTN; PAM sequence: TTC
aggcccacagctgggcacca

SEQ ID NO: 30247 - DNA, 20 bp, Artificial Sequence
  Description of Artificial Sequence: Synthetic oligonucleotide
  Target: COL7A1; (+) strand; PAM type: YTN; PAM sequence: CTG
ggcaccacaccctagcgagc

SEQ ID NO: 30248 - DNA, 20 bp, Artificial Sequence
  Description of Artificial Sequence: Synthetic oligonucleotide
  Target: COL7A1; (+) strand; PAM type: YTN; PAM sequence: CTA
gcgagctgcccccagaacac

SEQ ID NO: 30249 - DNA, 20 bp, Artificial Sequence
  Description of Artificial Sequence: Synthetic oligonucleotide
  Target: COL7A1; (+) strand; PAM type: YTN; PAM sequence: CTG
cccccagaacacatactggc

SEQ ID NO: 30250 - DNA, 20 bp, Artificial Sequence
  Description of Artificial Sequence: Synthetic oligonucleotide
  Target: COL7A1; (+) strand; PAM type: YTN; PAM sequence: CTG
gcacaccagggctccctctg

SEQ ID NO: 30251 - DNA, 20 bp, Artificial Sequence
  Description of Artificial Sequence: Synthetic oligonucleotide
  Target: COL7A1; (+) strand; PAM type: YTN; PAM sequence: CTC
cctctgtctccatcttttcc

SEQ ID NO: 30252 - DNA, 20 bp, Artificial Sequence
  Description of Artificial Sequence: Synthetic oligonucleotide
  Target: COL7A1; (+) strand; PAM type: YTN; PAM sequence: CTC
tgtctccatcttttccactg

SEQ ID NO: 30253 - DNA, 20 bp, Artificial Sequence
  Description of Artificial Sequence: Synthetic oligonucleotide
  Target: COL7A1; (+) strand; PAM type: YTN; PAM sequence: CTG
tctccatcttttccactggc

SEQ ID NO: 30254 - DNA, 20 bp, Artificial Sequence
  Description of Artificial Sequence: Synthetic oligonucleotide
  Target: COL7A1; (+) strand; PAM type: YTN; PAM sequence: CTC
catcttttccactggcacca

SEQ ID NO: 30255 - DNA, 20 bp, Artificial Sequence
  Description of Artificial Sequence: Synthetic oligonucleotide
  Target: COL7A1; (+) strand; PAM type: YTN; PAM sequence: CTT
ttccactggcaccatctcga

SEQ ID NO: 30256 - DNA, 20 bp, Artificial Sequence
  Description of Artificial Sequence: Synthetic oligonucleotide
  Target: COL7A1; (+) strand; PAM type: YTN; PAM sequence: TTT
tccactggcaccatctcgac

SEQ ID NO: 30257 - DNA, 20 bp, Artificial Sequence
  Description of Artificial Sequence: Synthetic oligonucleotide
  Target: COL7A1; (+) strand; PAM type: YTN; PAM sequence: TTT
ccactggcaccatctcgacc

SEQ ID NO: 30258 - DNA, 20 bp, Artificial Sequence
  Description of Artificial Sequence: Synthetic oligonucleotide
  Target: COL7A1; (+) strand; PAM type: YTN; PAM sequence: TTC
cactggcaccatctcgacct

SEQ ID NO: 30259 - DNA, 20 bp, Artificial Sequence
  Description of Artificial Sequence: Synthetic oligonucleotide
  Target: COL7A1; (+) strand; PAM type: YTN; PAM sequence: CTG
gcaccatctcgacctggggc

SEQ ID NO: 30260 - DNA, 20 bp, Artificial Sequence
  Description of Artificial Sequence: Synthetic oligonucleotide
  Target: COL7A1; (+) strand; PAM type: YTN; PAM sequence: CTC
gacctggggctcccggcttc

SEQ ID NO: 30261 - DNA, 20 bp, Artificial Sequence
  Description of Artificial Sequence: Synthetic oligonucleotide
  Target: COL7A1; (+) strand; PAM type: YTN; PAM sequence: CTG
gggctcccggcttccctgtc

SEQ ID NO: 30262 - DNA, 20 bp, Artificial Sequence
  Description of Artificial Sequence: Synthetic oligonucleotide
  Target: COL7A1; (+) strand; PAM type: YTN; PAM sequence: CTC
ccggcttccctgtctccccc

SEQ ID NO: 30263 - DNA, 20 bp, Artificial Sequence
  Description of Artificial Sequence: Synthetic oligonucleotide
  Target: COL7A1; (+) strand; PAM type: YTN; PAM sequence: CTT
ccctgtctccccctgagagg

SEQ ID NO: 30264 - DNA, 20 bp, Artificial Sequence
  Description of Artificial Sequence: Synthetic oligonucleotide
  Target: COL7A1; (+) strand; PAM type: YTN; PAM sequence: TTC
cctgtctccccctgagaggg

SEQ ID NO: 30265 - DNA, 20 bp, Artificial Sequence
  Description of Artificial Sequence: Synthetic oligonucleotide
  Target: COL7A1; (+) strand; PAM type: YTN; PAM sequence: CTG
tctccccctgagagggaaga

SEQ ID NO: 30266 - DNA, 20 bp, Artificial Sequence
  Description of Artificial Sequence: Synthetic oligonucleotide
  Target: COL7A1; (+) strand; PAM type: YTN; PAM sequence: CTC
cccctgagagggaagagctc

SEQ ID NO: 30267 - DNA, 20 bp, Artificial Sequence
  Description of Artificial Sequence: Synthetic oligonucleotide
  Target: COL7A1; (+) strand; PAM type: YTN; PAM sequence: CTG
agagggaagagctctgtcag

SEQ ID NO: 30268 - DNA, 20 bp, Artificial Sequence
  Description of Artificial Sequence: Synthetic oligonucleotide
  Target: COL7A1; (+) strand; PAM type: YTN; PAM sequence: CTC
tgtcagggctgcctgtcgac

SEQ ID NO: 30269 - DNA, 20 bp, Artificial Sequence
  Description of Artificial Sequence: Synthetic oligonucleotide
  Target: COL7A1; (+) strand; PAM type: YTN; PAM sequence: CTG
tcagggctgcctgtcgaccc

SEQ ID NO: 30270 - DNA, 20 bp, Artificial Sequence
  Description of Artificial Sequence: Synthetic oligonucleotide
  Target: COL7A1; (+) strand; PAM type: YTN; PAM sequence: CTG
cctgtcgacccttgacccct

SEQ ID NO: 30271 - DNA, 20 bp, Artificial Sequence
  Description of Artificial Sequence: Synthetic oligonucleotide
  Target: COL7A1; (+) strand; PAM type: YTN; PAM sequence: CTG
tcgacccttgacccctggag

SEQ ID NO: 30272 - DNA, 20 bp, Artificial Sequence
  Description of Artificial Sequence: Synthetic oligonucleotide
  Target: COL7A1; (+) strand; PAM type: YTN; PAM sequence: CTT
gacccctggagcccaaccct

SEQ ID NO: 30273 - DNA, 20 bp, Artificial Sequence
  Description of Artificial Sequence: Synthetic oligonucleotide
  Target: COL7A1; (+) strand; PAM type: YTN; PAM sequence: TTG
acccctggagcccaaccctt

SEQ ID NO: 30274 - DNA, 20 bp, Artificial Sequence
  Description of Artificial Sequence: Synthetic oligonucleotide
  Target: COL7A1; (+) strand; PAM type: YTN; PAM sequence: CTG
gagcccaacccttgaccccc

SEQ ID NO: 30275 - DNA, 20 bp, Artificial Sequence
  Description of Artificial Sequence: Synthetic oligonucleotide
  Target: COL7A1; (+) strand; PAM type: YTN; PAM sequence: CTT
gacccccagaactcaccact

SEQ ID NO: 30276 - DNA, 20 bp, Artificial Sequence
  Description of Artificial Sequence: Synthetic oligonucleotide
  Target: COL7A1; (+) strand; PAM type: YTN; PAM sequence: TTG
acccccagaactcaccactt

SEQ ID NO: 30277 - DNA, 20 bp, Artificial Sequence
  Description of Artificial Sequence: Synthetic oligonucleotide
  Target: COL7A1; (+) strand; PAM type: YTN; PAM sequence: CTC
accacttgtccaggcaaacc

SEQ ID NO: 30278 - DNA, 20 bp, Artificial Sequence
  Description of Artificial Sequence: Synthetic oligonucleotide
  Target: COL7A1; (+) strand; PAM type: YTN; PAM sequence: CTT
gtccaggcaaacctggagac

SEQ ID NO: 30279 - DNA, 20 bp, Artificial Sequence
  Description of Artificial Sequence: Synthetic oligonucleotide
  Target: COL7A1; (+) strand; PAM type: YTN; PAM sequence: TTG
tccaggcaaacctggagacc

SEQ ID NO: 30280 - DNA, 20 bp, Artificial Sequence
  Description of Artificial Sequence: Synthetic oligonucleotide
  Target: COL7A1; (+) strand; PAM type: YTN; PAM sequence: CTG
gagacccctgtggaccctga

SEQ ID NO: 30281 - DNA, 20 bp, Artificial Sequence
  Description of Artificial Sequence: Synthetic oligonucleotide
  Target: COL7A1; (+) strand; PAM type: YTN; PAM sequence: CTG
tggaccctgacggagaacaa

SEQ ID NO: 30282 - DNA, 20 bp, Artificial Sequence
  Description of Artificial Sequence: Synthetic oligonucleotide
  Target: COL7A1; (+) strand; PAM type: YTN; PAM sequence: CTG
acggagaacaagtcggatgt

SEQ ID NO: 30283 - DNA, 20 bp, Artificial Sequence
  Description of Artificial Sequence: Synthetic oligonucleotide
  Target: COL7A1; (+) strand; PAM type: YTN; PAM sequence: CTA
caggggccacagggactcac

SEQ ID NO: 30284 - DNA, 20 bp, Artificial Sequence
  Description of Artificial Sequence: Synthetic oligonucleotide
  Target: COL7A1; (+) strand; PAM type: YTN; PAM sequence: CTC
actcaccacaaggcctgaag

SEQ ID NO: 30285 - DNA, 20 bp, Artificial Sequence
  Description of Artificial Sequence: Synthetic oligonucleotide
  Target: COL7A1; (+) strand; PAM type: YTN; PAM sequence: CTC
accacaaggcctgaagggcc

SEQ ID NO: 30286 - DNA, 20 bp, Artificial Sequence
  Description of Artificial Sequence: Synthetic oligonucleotide
  Target: COL7A1; (+) strand; PAM type: YTN; PAM sequence: CTG
aagggccggggggtccagga

SEQ ID NO: 30287 - DNA, 20 bp, Artificial Sequence
  Description of Artificial Sequence: Synthetic oligonucleotide
  Target: COL7A1; (+) strand; PAM type: YTN; PAM sequence: CTC
cagtaggtccagtcaggccc

SEQ ID NO: 30288 - DNA, 20 bp, Artificial Sequence
  Description of Artificial Sequence: Synthetic oligonucleotide
  Target: COL7A1; (+) strand; PAM type: YTN; PAM sequence: CTG
gaggaagagaaagttcaggg

SEQ ID NO: 30289 - DNA, 20 bp, Artificial Sequence
  Description of Artificial Sequence: Synthetic oligonucleotide
  Target: COL7A1; (+) strand; PAM type: YTN; PAM sequence: TTC
agggcagtgccaaccccacc

SEQ ID NO: 30290 - DNA, 20 bp, Artificial Sequence
  Description of Artificial Sequence: Synthetic oligonucleotide
  Target: COL7A1; (+) strand; PAM type: YTN; PAM sequence: CTC
cctatgaccctaacctgtga

SEQ ID NO: 30291 - DNA, 20 bp, Artificial Sequence
  Description of Artificial Sequence: Synthetic oligonucleotide
  Target: COL7A1; (+) strand; PAM type: YTN; PAM sequence: CTA
tgaccctaacctgtgagcta

SEQ ID NO: 30292 - DNA, 20 bp, Artificial Sequence
  Description of Artificial Sequence: Synthetic oligonucleotide
  Target: COL7A1; (+) strand; PAM type: YTN; PAM sequence: CTA
acctgtgagctaggccactc

SEQ ID NO: 30293 - DNA, 20 bp, Artificial Sequence
  Description of Artificial Sequence: Synthetic oligonucleotide
  Target: COL7A1; (+) strand; PAM type: YTN; PAM sequence: CTG
tgagctaggccactcacccg

SEQ ID NO: 30294 - DNA, 20 bp, Artificial Sequence
  Description of Artificial Sequence: Synthetic oligonucleotide
  Target: COL7A1; (+) strand; PAM type: YTN; PAM sequence: CTA
ggccactcacccgtcctgga

SEQ ID NO: 30295 - DNA, 20 bp, Artificial Sequence
  Description of Artificial Sequence: Synthetic oligonucleotide
  Target: COL7A1; (+) strand; PAM type: YTN; PAM sequence: CTC
acccgtcctggaggtcctgt

SEQ ID NO: 30296 - DNA, 20 bp, Artificial Sequence
  Description of Artificial Sequence: Synthetic oligonucleotide
  Target: COL7A1; (+) strand; PAM type: YTN; PAM sequence: CTG
gaggtcctgtctctccaggc

SEQ ID NO: 30297 - DNA, 20 bp, Artificial Sequence
  Description of Artificial Sequence: Synthetic oligonucleotide
  Target: COL7A1; (+) strand; PAM type: YTN; PAM sequence: CTG
tctctccaggctccccctgc

SEQ ID NO: 30298 - DNA, 20 bp, Artificial Sequence
  Description of Artificial Sequence: Synthetic oligonucleotide
  Target: COL7A1; (+) strand; PAM type: YTN; PAM sequence: CTC
tccaggctccccctgcaaac

SEQ ID NO: 30299 - DNA, 20 bp, Artificial Sequence
  Description of Artificial Sequence: Synthetic oligonucleotide
  Target: COL7A1; (+) strand; PAM type: YTN; PAM sequence: CTC
caggctccccctgcaaacaa

SEQ ID NO: 30300 - DNA, 20 bp, Artificial Sequence
  Description of Artificial Sequence: Synthetic oligonucleotide
  Target: COL7A1; (+) strand; PAM type: YTN; PAM sequence: CTC
cccctgcaaacaacccagag

SEQ ID NO: 30301 - DNA, 20 bp, Artificial Sequence
  Description of Artificial Sequence: Synthetic oligonucleotide
  Target: COL7A1; (+) strand; PAM type: YTN; PAM sequence: CTG
caaacaacccagagactgca

SEQ ID NO: 30302 - DNA, 20 bp, Artificial Sequence
  Description of Artificial Sequence: Synthetic oligonucleotide
  Target: COL7A1; (+) strand; PAM type: YTN; PAM sequence: CTG
catgagcagagcccacgtgg

SEQ ID NO: 30303 - DNA, 20 bp, Artificial Sequence
  Description of Artificial Sequence: Synthetic oligonucleotide
  Target: COL7A1; (+) strand; PAM type: YTN; PAM sequence: CTC
ctggagctcatcctcattgc

SEQ ID NO: 30304 - DNA, 20 bp, Artificial Sequence
  Description of Artificial Sequence: Synthetic oligonucleotide
  Target: COL7A1; (+) strand; PAM type: YTN; PAM sequence: CTG
gagctcatcctcattgcagg

SEQ ID NO: 30305 - DNA, 20 bp, Artificial Sequence
  Description of Artificial Sequence: Synthetic oligonucleotide
  Target: COL7A1; (+) strand; PAM type: YTN; PAM sequence: CTC
atcctcattgcaggagatga

SEQ ID NO: 30306 - DNA, 20 bp, Artificial Sequence
  Description of Artificial Sequence: Synthetic oligonucleotide
  Target: COL7A1; (+) strand; PAM type: YTN; PAM sequence: CTC
attgcaggagatgacagccc

SEQ ID NO: 30307 - DNA, 20 bp, Artificial Sequence
  Description of Artificial Sequence: Synthetic oligonucleotide
  Target: COL7A1; (+) strand; PAM type: YTN; PAM sequence: TTG
caggagatgacagcccagga

SEQ ID NO: 30308 - DNA, 20 bp, Artificial Sequence
  Description of Artificial Sequence: Synthetic oligonucleotide
  Target: COL7A1; (+) strand; PAM type: YTN; PAM sequence: TTG
gcgcacactaccccaggcat

SEQ ID NO: 30309 - DNA, 20 bp, Artificial Sequence
  Description of Artificial Sequence: Synthetic oligonucleotide
  Target: COL7A1; (+) strand; PAM type: YTN; PAM sequence: CTA
ccccaggcatggacacagct

SEQ ID NO: 30310 - DNA, 20 bp, Artificial Sequence
  Description of Artificial Sequence: Synthetic oligonucleotide
  Target: COL7A1; (+) strand; PAM type: YTN; PAM sequence: CTT
gaaggagcctcctcctccta

SEQ ID NO: 30311 - DNA, 20 bp, Artificial Sequence
  Description of Artificial Sequence: Synthetic oligonucleotide
  Target: COL7A1; (+) strand; PAM type: YTN; PAM sequence: TTG
aaggagcctcctcctcctat

SEQ ID NO: 30312 - DNA, 20 bp, Artificial Sequence
  Description of Artificial Sequence: Synthetic oligonucleotide
  Target: COL7A1; (+) strand; PAM type: YTN; PAM sequence: CTC
ctcctcctatccacacacct

SEQ ID NO: 30313 - DNA, 20 bp, Artificial Sequence
  Description of Artificial Sequence: Synthetic oligonucleotide
  Target: COL7A1; (+) strand; PAM type: YTN; PAM sequence: CTC
ctcctatccacacacctaga

SEQ ID NO: 30314 - DNA, 20 bp, Artificial Sequence
  Description of Artificial Sequence: Synthetic oligonucleotide
  Target: COL7A1; (+) strand; PAM type: YTN; PAM sequence: CTC
ctatccacacacctagactc

SEQ ID NO: 30315 - DNA, 20 bp, Artificial Sequence
  Description of Artificial Sequence: Synthetic oligonucleotide
  Target: COL7A1; (+) strand; PAM type: YTN; PAM sequence: CTA
tccacacacctagactcacc

SEQ ID NO: 30316 - DNA, 20 bp, Artificial Sequence
  Description of Artificial Sequence: Synthetic oligonucleotide
  Target: COL7A1; (+) strand; PAM type: YTN; PAM sequence: CTA
gactcaccttcaggccagaa

SEQ ID NO: 30317 - DNA, 20 bp, Artificial Sequence
  Description of Artificial Sequence: Synthetic oligonucleotide
  Target: COL7A1; (+) strand; PAM type: YTN; PAM sequence: CTC
accttcaggccagaaggtcc

SEQ ID NO: 30318 - DNA, 20 bp, Artificial Sequence
  Description of Artificial Sequence: Synthetic oligonucleotide
  Target: COL7A1; (+) strand; PAM type: YTN; PAM sequence: CTT
caggccagaaggtccttggg

SEQ ID NO: 30319 - DNA, 20 bp, Artificial Sequence
  Description of Artificial Sequence: Synthetic oligonucleotide
  Target: COL7A1; (+) strand; PAM type: YTN; PAM sequence: TTC
aggccagaaggtccttgggg

SEQ ID NO: 30320 - DNA, 20 bp, Artificial Sequence
  Description of Artificial Sequence: Synthetic oligonucleotide
  Target: COL7A1; (+) strand; PAM type: YTN; PAM sequence: CTT
ggggtcctgcagggccagca

SEQ ID NO: 30321 - DNA, 20 bp, Artificial Sequence
  Description of Artificial Sequence: Synthetic oligonucleotide
  Target: COL7A1; (+) strand; PAM type: YTN; PAM sequence: TTG
gggtcctgcagggccagcaa

SEQ ID NO: 30322 - DNA, 20 bp, Artificial Sequence
  Description of Artificial Sequence: Synthetic oligonucleotide
  Target: COL7A1; (+) strand; PAM type: YTN; PAM sequence: CTG
cagggccagcaagaccctag

SEQ ID NO: 30323 - DNA, 20 bp, Artificial Sequence
  Description of Artificial Sequence: Synthetic oligonucleotide
  Target: COL7A1; (+) strand; PAM type: YTN; PAM sequence: CTA
gagaaaagggtcaagggcag

SEQ ID NO: 30324 - DNA, 20 bp, Artificial Sequence
  Description of Artificial Sequence: Synthetic oligonucleotide
  Target: COL7A1; (+) strand; PAM type: YTN; PAM sequence: CTC
agggattaacacagagaagg

SEQ ID NO: 30325 - DNA, 20 bp, Artificial Sequence
  Description of Artificial Sequence: Synthetic oligonucleotide
  Target: COL7A1; (+) strand; PAM type: YTN; PAM sequence: TTA
acacagagaaggcctggctc

SEQ ID NO: 30326 - DNA, 20 bp, Artificial Sequence
  Description of Artificial Sequence: Synthetic oligonucleotide
  Target: COL7A1; (+) strand; PAM type: YTN; PAM sequence: CTG
gctcatcagctgtggccaat

SEQ ID NO: 30327 - DNA, 20 bp, Artificial Sequence
  Description of Artificial Sequence: Synthetic oligonucleotide
  Target: COL7A1; (+) strand; PAM type: YTN; PAM sequence: CTC
atcagctgtggccaatgcct

SEQ ID NO: 30328 - DNA, 20 bp, Artificial Sequence
  Description of Artificial Sequence: Synthetic oligonucleotide
  Target: COL7A1; (+) strand; PAM type: YTN; PAM sequence: CTG
tggccaatgcctatcccagc

SEQ ID NO: 30329 - DNA, 20 bp, Artificial Sequence
  Description of Artificial Sequence: Synthetic oligonucleotide
  Target: COL7A1; (+) strand; PAM type: YTN; PAM sequence: CTA
tcccagcccttccagaccct

SEQ ID NO: 30330 - DNA, 20 bp, Artificial Sequence
  Description of Artificial Sequence: Synthetic oligonucleotide
  Target: COL7A1; (+) strand; PAM type: YTN; PAM sequence: CTT
ccagaccctcaccaggcagt

SEQ ID NO: 30331 - DNA, 20 bp, Artificial Sequence
  Description of Artificial Sequence: Synthetic oligonucleotide
  Target: COL7A1; (+) strand; PAM type: YTN; PAM sequence: TTC
cagaccctcaccaggcagtg

SEQ ID NO: 30332 - DNA, 20 bp, Artificial Sequence
  Description of Artificial Sequence: Synthetic oligonucleotide
  Target: COL7A1; (+) strand; PAM type: YTN; PAM sequence: CTC
accaggcagtgttccctggt

SEQ ID NO: 30333 - DNA, 20 bp, Artificial Sequence
  Description of Artificial Sequence: Synthetic oligonucleotide
  Target: COL7A1; (+) strand; PAM type: YTN; PAM sequence: TTC
cctggtcactcaccggggca

SEQ ID NO: 30334 - DNA, 20 bp, Artificial Sequence
  Description of Artificial Sequence: Synthetic oligonucleotide
  Target: COL7A1; (+) strand; PAM type: YTN; PAM sequence: CTG
gtcactcaccggggcaccag

SEQ ID NO: 30335 - DNA, 20 bp, Artificial Sequence
  Description of Artificial Sequence: Synthetic oligonucleotide
  Target: COL7A1; (+) strand; PAM type: YTN; PAM sequence: CTC
accggggcaccaggtggtcc

SEQ ID NO: 30336 - DNA, 20 bp, Artificial Sequence
  Description of Artificial Sequence: Synthetic oligonucleotide
  Target: COL7A1; (+) strand; PAM type: YTN; PAM sequence: CTC
catgaccaccctgttgtggc

SEQ ID NO: 30337 - DNA, 20 bp, Artificial Sequence
  Description of Artificial Sequence: Synthetic oligonucleotide
  Target: COL7A1; (+) strand; PAM type: YTN; PAM sequence: CTG
ttgtggcgaaaaagagtctg

SEQ ID NO: 30338 - DNA, 20 bp, Artificial Sequence
  Description of Artificial Sequence: Synthetic oligonucleotide
  Target: COL7A1; (+) strand; PAM type: YTN; PAM sequence: TTG
tggcgaaaaagagtctgatg

SEQ ID NO: 30339 - DNA, 20 bp, Artificial Sequence
  Description of Artificial Sequence: Synthetic oligonucleotide
  Target: COL7A1; (+) strand; PAM type: YTN; PAM sequence: CTG
atgagggggagttagccgca

SEQ ID NO: 30340 - DNA, 20 bp, Artificial Sequence
  Description of Artificial Sequence: Synthetic oligonucleotide
  Target: COL7A1; (+) strand; PAM type: YTN; PAM sequence: TTA
gccgcaccccaccaaggaaa

SEQ ID NO: 30341 - DNA, 20 bp, Artificial Sequence
  Description of Artificial Sequence: Synthetic oligonucleotide
  Target: COL7A1; (+) strand; PAM type: YTN; PAM sequence: CTG
aggcagtactggtcactggg

SEQ ID NO: 30342 - DNA, 20 bp, Artificial Sequence
  Description of Artificial Sequence: Synthetic oligonucleotide
  Target: COL7A1; (+) strand; PAM type: YTN; PAM sequence: CTG
gtcactggggcagggcacag

SEQ ID NO: 30343 - DNA, 20 bp, Artificial Sequence
  Description of Artificial Sequence: Synthetic oligonucleotide
  Target: COL7A1; (+) strand; PAM type: YTN; PAM sequence: CTG
gggcagggcacaggatgggg

SEQ ID NO: 30344 - DNA, 20 bp, Artificial Sequence
  Description of Artificial Sequence: Synthetic oligonucleotide
  Target: COL7A1; (+) strand; PAM type: YTN; PAM sequence: TTC
ttgggtactcaccactgggc

SEQ ID NO: 30345 - DNA, 20 bp, Artificial Sequence
  Description of Artificial Sequence: Synthetic oligonucleotide
  Target: COL7A1; (+) strand; PAM type: YTN; PAM sequence: CTT
gggtactcaccactgggcca

SEQ ID NO: 30346 - DNA, 20 bp, Artificial Sequence
  Description of Artificial Sequence: Synthetic oligonucleotide
  Target: COL7A1; (+) strand; PAM type: YTN; PAM sequence: TTG
ggtactcaccactgggccag

SEQ ID NO: 30347 - DNA, 20 bp, Artificial Sequence
  Description of Artificial Sequence: Synthetic oligonucleotide
  Target: COL7A1; (+) strand; PAM type: YTN; PAM sequence: CTC
accactgggccaggggggcc

SEQ ID NO: 30348 - DNA, 20 bp, Artificial Sequence
  Description of Artificial Sequence: Synthetic oligonucleotide
  Target: COL7A1; (+) strand; PAM type: YTN; PAM sequence: CTG
ggccaggggggcctcttgga

SEQ ID NO: 30349 - DNA, 20 bp, Artificial Sequence
  Description of Artificial Sequence: Synthetic oligonucleotide
  Target: COL7A1; (+) strand; PAM type: YTN; PAM sequence: CTC
ttggaccctgcagaccctac

SEQ ID NO: 30350 - DNA, 20 bp, Artificial Sequence
  Description of Artificial Sequence: Synthetic oligonucleotide
  Target: COL7A1; (+) strand; PAM type: YTN; PAM sequence: CTT
ggaccctgcagaccctacat

SEQ ID NO: 30351 - DNA, 20 bp, Artificial Sequence
  Description of Artificial Sequence: Synthetic oligonucleotide
  Target: COL7A1; (+) strand; PAM type: YTN; PAM sequence: TTG
gaccctgcagaccctacata

SEQ ID NO: 30352 - DNA, 20 bp, Artificial Sequence
  Description of Artificial Sequence: Synthetic oligonucleotide
  Target: COL7A1; (+) strand; PAM type: YTN; PAM sequence: CTG
cagaccctacatagagaggg

SEQ ID NO: 30353 - DNA, 20 bp, Artificial Sequence
  Description of Artificial Sequence: Synthetic oligonucleotide
  Target: COL7A1; (+) strand; PAM type: YTN; PAM sequence: CTA
catagagagggcactgatga

SEQ ID NO: 30354 - DNA, 20 bp, Artificial Sequence
  Description of Artificial Sequence: Synthetic oligonucleotide
  Target: COL7A1; (+) strand; PAM type: YTN; PAM sequence: CTG
atgagcctcaatctgggcct

SEQ ID NO: 30355 - DNA, 20 bp, Artificial Sequence
  Description of Artificial Sequence: Synthetic oligonucleotide
  Target: COL7A1; (+) strand; PAM type: YTN; PAM sequence: CTC
aatctgggcctcacttgggc

SEQ ID NO: 30356 - DNA, 20 bp, Artificial Sequence
  Description of Artificial Sequence: Synthetic oligonucleotide
  Target: COL7A1; (+) strand; PAM type: YTN; PAM sequence: CTG
ggcctcacttgggcctgttc

SEQ ID NO: 30357 - DNA, 20 bp, Artificial Sequence
  Description of Artificial Sequence: Synthetic oligonucleotide
  Target: COL7A1; (+) strand; PAM type: YTN; PAM sequence: CTC
acttgggcctgttcccaacc

SEQ ID NO: 30358 - DNA, 20 bp, Artificial Sequence
  Description of Artificial Sequence: Synthetic oligonucleotide
  Target: COL7A1; (+) strand; PAM type: YTN; PAM sequence: CTT
gggcctgttcccaacctctg

SEQ ID NO: 30359 - DNA, 20 bp, Artificial Sequence
  Description of Artificial Sequence: Synthetic oligonucleotide
  Target: COL7A1; (+) strand; PAM type: YTN; PAM sequence: TTG
ggcctgttcccaacctctgg

SEQ ID NO: 30360 - DNA, 20 bp, Artificial Sequence
  Description of Artificial Sequence: Synthetic oligonucleotide
  Target: COL7A1; (+) strand; PAM type: YTN; PAM sequence: CTG
ttcccaacctctgggggctt

SEQ ID NO: 30361 - DNA, 20 bp, Artificial Sequence
  Description of Artificial Sequence: Synthetic oligonucleotide
  Target: COL7A1; (+) strand; PAM type: YTN; PAM sequence: TTC
ccaacctctgggggcttttt

SEQ ID NO: 30362 - DNA, 20 bp, Artificial Sequence
  Description of Artificial Sequence: Synthetic oligonucleotide
  Target: COL7A1; (+) strand; PAM type: YTN; PAM sequence: CTC
tgggggctttttccttgggg

SEQ ID NO: 30363 - DNA, 20 bp, Artificial Sequence
  Description of Artificial Sequence: Synthetic oligonucleotide
  Target: COL7A1; (+) strand; PAM type: YTN; PAM sequence: CTG
ggggctttttccttgggggt

SEQ ID NO: 30364 - DNA, 20 bp, Artificial Sequence
  Description of Artificial Sequence: Synthetic oligonucleotide
  Target: COL7A1; (+) strand; PAM type: YTN; PAM sequence: CTT
tttccttgggggtcaatttc

SEQ ID NO: 30365 - DNA, 20 bp, Artificial Sequence
  Description of Artificial Sequence: Synthetic oligonucleotide
  Target: COL7A1; (+) strand; PAM type: YTN; PAM sequence: TTT
ttccttgggggtcaatttcc

SEQ ID NO: 30366 - DNA, 20 bp, Artificial Sequence
  Description of Artificial Sequence: Synthetic oligonucleotide
  Target: COL7A1; (+) strand; PAM type: YTN; PAM sequence: TTT
tccttgggggtcaatttcca

SEQ ID NO: 30367 - DNA, 20 bp, Artificial Sequence
  Description of Artificial Sequence: Synthetic oligonucleotide
  Target: COL7A1; (+) strand; PAM type: YTN; PAM sequence: TTT
ccttgggggtcaatttccat

SEQ ID NO: 30368 - DNA, 20 bp, Artificial Sequence
  Description of Artificial Sequence: Synthetic oligonucleotide
  Target: COL7A1; (+) strand; PAM type: YTN; PAM sequence: TTC
cttgggggtcaatttccata

SEQ ID NO: 30369 - DNA, 20 bp, Artificial Sequence
  Description of Artificial Sequence: Synthetic oligonucleotide
  Target: COL7A1; (+) strand; PAM type: YTN; PAM sequence: CTT
gggggtcaatttccatacct

SEQ ID NO: 30370 - DNA, 20 bp, Artificial Sequence
  Description of Artificial Sequence: Synthetic oligonucleotide
  Target: COL7A1; (+) strand; PAM type: YTN; PAM sequence: TTG
ggggtcaatttccatacctc

SEQ ID NO: 30371 - DNA, 20 bp, Artificial Sequence
  Description of Artificial Sequence: Synthetic oligonucleotide
  Target: COL7A1; (+) strand; PAM type: YTN; PAM sequence: TTT
ccatacctcaccctttccag

SEQ ID NO: 30372 - DNA, 20 bp, Artificial Sequence
  Description of Artificial Sequence: Synthetic oligonucleotide
  Target: COL7A1; (+) strand; PAM type: YTN; PAM sequence: TTC
catacctcaccctttccagt

SEQ ID NO: 30373 - DNA, 20 bp, Artificial Sequence
  Description of Artificial Sequence: Synthetic oligonucleotide
  Target: COL7A1; (+) strand; PAM type: YTN; PAM sequence: CTC
accctttccagtcacagata

SEQ ID NO: 30374 - DNA, 20 bp, Artificial Sequence
  Description of Artificial Sequence: Synthetic oligonucleotide
  Target: COL7A1; (+) strand; PAM type: YTN; PAM sequence: CTT
tccagtcacagataatacct

SEQ ID NO: 30375 - DNA, 20 bp, Artificial Sequence
  Description of Artificial Sequence: Synthetic oligonucleotide
  Target: COL7A1; (+) strand; PAM type: YTN; PAM sequence: TTT
ccagtcacagataataccta

SEQ ID NO: 30376 - DNA, 20 bp, Artificial Sequence
  Description of Artificial Sequence: Synthetic oligonucleotide
  Target: COL7A1; (+) strand; PAM type: YTN; PAM sequence: TTC
cagtcacagataatacctac

SEQ ID NO: 30377 - DNA, 20 bp, Artificial Sequence
  Description of Artificial Sequence: Synthetic oligonucleotide
  Target: COL7A1; (+) strand; PAM type: YTN; PAM sequence: CTA
cccatggactgcctctcata

SEQ ID NO: 30378 - DNA, 20 bp, Artificial Sequence
  Description of Artificial Sequence: Synthetic oligonucleotide
  Target: COL7A1; (+) strand; PAM type: YTN; PAM sequence: CTG
cctctcatagatagcacaca

SEQ ID NO: 30379 - DNA, 20 bp, Artificial Sequence
  Description of Artificial Sequence: Synthetic oligonucleotide
  Target: COL7A1; (+) strand; PAM type: YTN; PAM sequence: CTC
tcatagatagcacacacggg

SEQ ID NO: 30380 - DNA, 20 bp, Artificial Sequence
  Description of Artificial Sequence: Synthetic oligonucleotide
  Target: COL7A1; (+) strand; PAM type: YTN; PAM sequence: CTC
atagatagcacacacgggcc

SEQ ID NO: 30381 - DNA, 20 bp, Artificial Sequence
  Description of Artificial Sequence: Synthetic oligonucleotide
  Target: COL7A1; (+) strand; PAM type: YTN; PAM sequence: CTG
cacacacacatccacataca

SEQ ID NO: 30382 - DNA, 20 bp, Artificial Sequence
  Description of Artificial Sequence: Synthetic oligonucleotide
  Target: COL7A1; (+) strand; PAM type: YTN; PAM sequence: CTA
gcggagggtccggagcctgg

SEQ ID NO: 30383 - DNA, 20 bp, Artificial Sequence
  Description of Artificial Sequence: Synthetic oligonucleotide
  Target: COL7A1; (+) strand; PAM type: YTN; PAM sequence: CTG
gggccaggtgcttcagccac

SEQ ID NO: 30384 - DNA, 20 bp, Artificial Sequence
  Description of Artificial Sequence: Synthetic oligonucleotide
  Target: COL7A1; (+) strand; PAM type: YTN; PAM sequence: CTT
cagccaccactcaccggctt

SEQ ID NO: 30385 - DNA, 20 bp, Artificial Sequence
  Description of Artificial Sequence: Synthetic oligonucleotide
  Target: COL7A1; (+) strand; PAM type: YTN; PAM sequence: TTC
agccaccactcaccggcttc

SEQ ID NO: 30386 - DNA, 20 bp, Artificial Sequence
  Description of Artificial Sequence: Synthetic oligonucleotide
  Target: COL7A1; (+) strand; PAM type: YTN; PAM sequence: CTC
accggcttcccttcaggccc

SEQ ID NO: 30387 - DNA, 20 bp, Artificial Sequence
  Description of Artificial Sequence: Synthetic oligonucleotide
  Target: COL7A1; (+) strand; PAM type: YTN; PAM sequence: CTT
cccttcaggcccagccatac

SEQ ID NO: 30388 - DNA, 20 bp, Artificial Sequence
  Description of Artificial Sequence: Synthetic oligonucleotide
  Target: COL7A1; (+) strand; PAM type: YTN; PAM sequence: TTC
ccttcaggcccagccatacc

SEQ ID NO: 30389 - DNA, 20 bp, Artificial Sequence
  Description of Artificial Sequence: Synthetic oligonucleotide
  Target: COL7A1; (+) strand; PAM type: YTN; PAM sequence: CTT
caggcccagccataccacgc

SEQ ID NO: 30390 - DNA, 20 bp, Artificial Sequence
  Description of Artificial Sequence: Synthetic oligonucleotide
  Target: COL7A1; (+) strand; PAM type: YTN; PAM sequence: TTC
aggcccagccataccacgct

SEQ ID NO: 30391 - DNA, 20 bp, Artificial Sequence
  Description of Artificial Sequence: Synthetic oligonucleotide
  Target: COL7A1; (+) strand; PAM type: YTN; PAM sequence: CTC
tcctggtagaccctgcagag

SEQ ID NO: 30392 - DNA, 20 bp, Artificial Sequence
  Description of Artificial Sequence: Synthetic oligonucleotide
  Target: COL7A1; (+) strand; PAM type: YTN; PAM sequence: CTC
ctggtagaccctgcagagaa

SEQ ID NO: 30393 - DNA, 20 bp, Artificial Sequence
  Description of Artificial Sequence: Synthetic oligonucleotide
  Target: COL7A1; (+) strand; PAM type: YTN; PAM sequence: CTG
gtagaccctgcagagaatag

SEQ ID NO: 30394 - DNA, 20 bp, Artificial Sequence
  Description of Artificial Sequence: Synthetic oligonucleotide
  Target: COL7A1; (+) strand; PAM type: YTN; PAM sequence: CTG
cagagaataggtttaaggcc

SEQ ID NO: 30395 - DNA, 20 bp, Artificial Sequence
  Description of Artificial Sequence: Synthetic oligonucleotide
  Target: COL7A1; (+) strand; PAM type: YTN; PAM sequence: TTT
aaggccttagtttcccagtt

SEQ ID NO: 30396 - DNA, 20 bp, Artificial Sequence
  Description of Artificial Sequence: Synthetic oligonucleotide
  Target: COL7A1; (+) strand; PAM type: YTN; PAM sequence: TTA
aggccttagtttcccagttc

SEQ ID NO: 30397 - DNA, 20 bp, Artificial Sequence
  Description of Artificial Sequence: Synthetic oligonucleotide
  Target: COL7A1; (+) strand; PAM type: YTN; PAM sequence: CTT
agtttcccagttccaacttc

SEQ ID NO: 30398 - DNA, 20 bp, Artificial Sequence
  Description of Artificial Sequence: Synthetic oligonucleotide
  Target: COL7A1; (+) strand; PAM type: YTN; PAM sequence: TTA
gtttcccagttccaacttcc

SEQ ID NO: 30399 - DNA, 20 bp, Artificial Sequence
  Description of Artificial Sequence: Synthetic oligonucleotide
  Target: COL7A1; (+) strand; PAM type: YTN; PAM sequence: TTT
cccagttccaacttcccctc

SEQ ID NO: 30400 - DNA, 20 bp, Artificial Sequence
  Description of Artificial Sequence: Synthetic oligonucleotide
  Target: COL7A1; (+) strand; PAM type: YTN; PAM sequence: TTC
ccagttccaacttcccctcc

SEQ ID NO: 30401 - DNA, 20 bp, Artificial Sequence
  Description of Artificial Sequence: Synthetic oligonucleotide
  Target: COL7A1; (+) strand; PAM type: YTN; PAM sequence: TTC
caacttcccctccacccacc

SEQ ID NO: 30402 - DNA, 20 bp, Artificial Sequence
  Description of Artificial Sequence: Synthetic oligonucleotide
  Target: COL7A1; (+) strand; PAM type: YTN; PAM sequence: CTT
cccctccacccaccatcccc

SEQ ID NO: 30403 - DNA, 20 bp, Artificial Sequence
  Description of Artificial Sequence: Synthetic oligonucleotide
  Target: COL7A1; (+) strand; PAM type: YTN; PAM sequence: TTC
ccctccacccaccatccccc

SEQ ID NO: 30404 - DNA, 20 bp, Artificial Sequence
  Description of Artificial Sequence: Synthetic oligonucleotide
  Target: COL7A1; (+) strand; PAM type: YTN; PAM sequence: CTC
cacccaccatccccctagac

SEQ ID NO: 30405 - DNA, 20 bp, Artificial Sequence
  Description of Artificial Sequence: Synthetic oligonucleotide
  Target: COL7A1; (+) strand; PAM type: YTN; PAM sequence: CTA
gacagagtcaggacccagac

SEQ ID NO: 30406 - DNA, 20 bp, Artificial Sequence
  Description of Artificial Sequence: Synthetic oligonucleotide
  Target: COL7A1; (+) strand; PAM type: YTN; PAM sequence: CTG
cacacaggacaatacatgtg

SEQ ID NO: 30407 - DNA, 20 bp, Artificial Sequence
  Description of Artificial Sequence: Synthetic oligonucleotide
  Target: COL7A1; (+) strand; PAM type: YTN; PAM sequence: CTT
cttgcacatgtgtggctgtt

SEQ ID NO: 30408 - DNA, 20 bp, Artificial Sequence
  Description of Artificial Sequence: Synthetic oligonucleotide
  Target: COL7A1; (+) strand; PAM type: YTN; PAM sequence: TTC
ttgcacatgtgtggctgttg

SEQ ID NO: 30409 - DNA, 20 bp, Artificial Sequence
  Description of Artificial Sequence: Synthetic oligonucleotide
  Target: COL7A1; (+) strand; PAM type: YTN; PAM sequence: CTT
gcacatgtgtggctgttggg

SEQ ID NO: 30410 - DNA, 20 bp, Artificial Sequence
  Description of Artificial Sequence: Synthetic oligonucleotide
  Target: COL7A1; (+) strand; PAM type: YTN; PAM sequence: TTG
cacatgtgtggctgttgggc

SEQ ID NO: 30411 - DNA, 20 bp, Artificial Sequence
  Description of Artificial Sequence: Synthetic oligonucleotide
  Target: COL7A1; (+) strand; PAM type: YTN; PAM sequence: CTG
ttgggcaaggacttaccggg

SEQ ID NO: 30412 - DNA, 20 bp, Artificial Sequence
  Description of Artificial Sequence: Synthetic oligonucleotide
  Target: COL7A1; (+) strand; PAM type: YTN; PAM sequence: TTG
ggcaaggacttaccgggttg

SEQ ID NO: 30413 - DNA, 20 bp, Artificial Sequence
  Description of Artificial Sequence: Synthetic oligonucleotide
  Target: COL7A1; (+) strand; PAM type: YTN; PAM sequence: CTT
accgggttgccgtcctgacc

SEQ ID NO: 30414 - DNA, 20 bp, Artificial Sequence
  Description of Artificial Sequence: Synthetic oligonucleotide
  Target: COL7A1; (+) strand; PAM type: YTN; PAM sequence: TTA
ccgggttgccgtcctgaccc

SEQ ID NO: 30415 - DNA, 20 bp, Artificial Sequence
  Description of Artificial Sequence: Synthetic oligonucleotide
  Target: COL7A1; (+) strand; PAM type: YTN; PAM sequence: TTG
ccgtcctgacccctcggtcc

SEQ ID NO: 30416 - DNA, 20 bp, Artificial Sequence
  Description of Artificial Sequence: Synthetic oligonucleotide
  Target: COL7A1; (+) strand; PAM type: YTN; PAM sequence: CTG
acccctcggtccaggctctc

SEQ ID NO: 30417 - DNA, 20 bp, Artificial Sequence
  Description of Artificial Sequence: Synthetic oligonucleotide
  Target: COL7A1; (+) strand; PAM type: YTN; PAM sequence: CTC
ggtccaggctctccccggtc

SEQ ID NO: 30418 - DNA, 20 bp, Artificial Sequence
  Description of Artificial Sequence: Synthetic oligonucleotide
  Target: COL7A1; (+) strand; PAM type: YTN; PAM sequence: CTC
tccccggtctcctttgatgc

SEQ ID NO: 30419 - DNA, 20 bp, Artificial Sequence
  Description of Artificial Sequence: Synthetic oligonucleotide
  Target: COL7A1; (+) strand; PAM type: YTN; PAM sequence: CTC
cccggtctcctttgatgcct

SEQ ID NO: 30420 - DNA, 20 bp, Artificial Sequence
  Description of Artificial Sequence: Synthetic oligonucleotide
  Target: COL7A1; (+) strand; PAM type: YTN; PAM sequence: CTC
ctttgatgcctggcacaccc

SEQ ID NO: 30421 - DNA, 20 bp, Artificial Sequence
  Description of Artificial Sequence: Synthetic oligonucleotide
  Target: COL7A1; (+) strand; PAM type: YTN; PAM sequence: CTT
tgatgcctggcacaccctga

SEQ ID NO: 30422 - DNA, 20 bp, Artificial Sequence
  Description of Artificial Sequence: Synthetic oligonucleotide
  Target: COL7A1; (+) strand; PAM type: YTN; PAM sequence: TTT
gatgcctggcacaccctgaa

SEQ ID NO: 30423 - DNA, 20 bp, Artificial Sequence
  Description of Artificial Sequence: Synthetic oligonucleotide
  Target: COL7A1; (+) strand; PAM type: YTN; PAM sequence: TTG
atgcctggcacaccctgaag

SEQ ID NO: 30424 - DNA, 20 bp, Artificial Sequence
  Description of Artificial Sequence: Synthetic oligonucleotide
  Target: COL7A1; (+) strand; PAM type: YTN; PAM sequence: CTG
gcacaccctgaaggcagagt

SEQ ID NO: 30425 - DNA, 20 bp, Artificial Sequence
  Description of Artificial Sequence: Synthetic oligonucleotide
  Target: COL7A1; (+) strand; PAM type: YTN; PAM sequence: CTG
aaggcagagtgtcgtgccct

SEQ ID NO: 30426 - DNA, 20 bp, Artificial Sequence
  Description of Artificial Sequence: Synthetic oligonucleotide
  Target: COL7A1; (+) strand; PAM type: YTN; PAM sequence: CTG
agcccccagtccctgccacg

SEQ ID NO: 30427 - DNA, 20 bp, Artificial Sequence
  Description of Artificial Sequence: Synthetic oligonucleotide
  Target: COL7A1; (+) strand; PAM type: YTN; PAM sequence: CTG
ccacgtgcccaggtgcatat

SEQ ID NO: 30428 - DNA, 20 bp, Artificial Sequence
  Description of Artificial Sequence: Synthetic oligonucleotide
  Target: COL7A1; (+) strand; PAM type: YTN; PAM sequence: CTC
tagtgtgcccccagaaagga

SEQ ID NO: 30429 - DNA, 20 bp, Artificial Sequence
  Description of Artificial Sequence: Synthetic oligonucleotide
  Target: COL7A1; (+) strand; PAM type: YTN; PAM sequence: CTA
gtgtgcccccagaaaggagg

SEQ ID NO: 30430 - DNA, 20 bp, Artificial Sequence
  Description of Artificial Sequence: Synthetic oligonucleotide
  Target: COL7A1; (+) strand; PAM type: YTN; PAM sequence: CTC
tatggaagggtggagagagg

SEQ ID NO: 30431 - DNA, 20 bp, Artificial Sequence
  Description of Artificial Sequence: Synthetic oligonucleotide
  Target: COL7A1; (+) strand; PAM type: YTN; PAM sequence: CTA
tggaagggtggagagaggcc

SEQ ID NO: 30432 - DNA, 20 bp, Artificial Sequence
  Description of Artificial Sequence: Synthetic oligonucleotide
  Target: COL7A1; (+) strand; PAM type: YTN; PAM sequence: CTC
accctgtctcctttgggacc

SEQ ID NO: 30433 - DNA, 20 bp, Artificial Sequence
  Description of Artificial Sequence: Synthetic oligonucleotide
  Target: COL7A1; (+) strand; PAM type: YTN; PAM sequence: CTG
tctcctttgggaccttggtc

SEQ ID NO: 30434 - DNA, 20 bp, Artificial Sequence
  Description of Artificial Sequence: Synthetic oligonucleotide
  Target: COL7A1; (+) strand; PAM type: YTN; PAM sequence: CTC
ctttgggaccttggtcacca

SEQ ID NO: 30435 - DNA, 20 bp, Artificial Sequence
  Description of Artificial Sequence: Synthetic oligonucleotide
  Target: COL7A1; (+) strand; PAM type: YTN; PAM sequence: CTT
tgggaccttggtcaccattg

SEQ ID NO: 30436 - DNA, 20 bp, Artificial Sequence
  Description of Artificial Sequence: Synthetic oligonucleotide
  Target: COL7A1; (+) strand; PAM type: YTN; PAM sequence: TTT
gggaccttggtcaccattgc

SEQ ID NO: 30437 - DNA, 20 bp, Artificial Sequence
  Description of Artificial Sequence: Synthetic oligonucleotide
  Target: COL7A1; (+) strand; PAM type: YTN; PAM sequence: TTG
ggaccttggtcaccattgct

SEQ ID NO: 30438 - DNA, 20 bp, Artificial Sequence
  Description of Artificial Sequence: Synthetic oligonucleotide
  Target: COL7A1; (+) strand; PAM type: YTN; PAM sequence: CTT
ggtcaccattgctgcccggc

SEQ ID NO: 30439 - DNA, 20 bp, Artificial Sequence
  Description of Artificial Sequence: Synthetic oligonucleotide
  Target: COL7A1; (+) strand; PAM type: YTN; PAM sequence: TTG
gtcaccattgctgcccggct

SEQ ID NO: 30440 - DNA, 20 bp, Artificial Sequence
  Description of Artificial Sequence: Synthetic oligonucleotide
  Target: COL7A1; (+) strand; PAM type: YTN; PAM sequence: TTG
ctgcccggctccccctgtgg

SEQ ID NO: 30441 - DNA, 20 bp, Artificial Sequence
  Description of Artificial Sequence: Synthetic oligonucleotide
  Target: COL7A1; (+) strand; PAM type: YTN; PAM sequence: CTG
cccggctccccctgtgggga

SEQ ID NO: 30442 - DNA, 20 bp, Artificial Sequence
  Description of Artificial Sequence: Synthetic oligonucleotide
  Target: COL7A1; (+) strand; PAM type: YTN; PAM sequence: CTC
cccctgtggggatgagatgt

SEQ ID NO: 30443 - DNA, 20 bp, Artificial Sequence
  Description of Artificial Sequence: Synthetic oligonucleotide
  Target: COL7A1; (+) strand; PAM type: YTN; PAM sequence: CTG
tggggatgagatgtcaagtc

SEQ ID NO: 30444 - DNA, 20 bp, Artificial Sequence
  Description of Artificial Sequence: Synthetic oligonucleotide
  Target: COL7A1; (+) strand; PAM type: YTN; PAM sequence: CTA
gtgccatggcagagggtggc

SEQ ID NO: 30445 - DNA, 20 bp, Artificial Sequence
  Description of Artificial Sequence: Synthetic oligonucleotide
  Target: COL7A1; (+) strand; PAM type: YTN; PAM sequence: CTG
attccacacactgaccttag

SEQ ID NO: 30446 - DNA, 20 bp, Artificial Sequence
  Description of Artificial Sequence: Synthetic oligonucleotide
  Target: COL7A1; (+) strand; PAM type: YTN; PAM sequence: TTC
cacacactgaccttagcacc

SEQ ID NO: 30447 - DNA, 20 bp, Artificial Sequence
  Description of Artificial Sequence: Synthetic oligonucleotide
  Target: COL7A1; (+) strand; PAM type: YTN; PAM sequence: CTG
accttagcacccttgagtcc

SEQ ID NO: 30448 - DNA, 20 bp, Artificial Sequence
  Description of Artificial Sequence: Synthetic oligonucleotide
  Target: COL7A1; (+) strand; PAM type: YTN; PAM sequence: CTT
agcacccttgagtccagggg

SEQ ID NO: 30449 - DNA, 20 bp, Artificial Sequence
  Description of Artificial Sequence: Synthetic oligonucleotide
  Target: COL7A1; (+) strand; PAM type: YTN; PAM sequence: TTA
gcacccttgagtccaggggg

SEQ ID NO: 30450 - DNA, 20 bp, Artificial Sequence
  Description of Artificial Sequence: Synthetic oligonucleotide
  Target: COL7A1; (+) strand; PAM type: YTN; PAM sequence: CTT
gagtccagggggtccctgtt

SEQ ID NO: 30451 - DNA, 20 bp, Artificial Sequence
  Description of Artificial Sequence: Synthetic oligonucleotide
  Target: COL7A1; (+) strand; PAM type: YTN; PAM sequence: TTG
agtccagggggtccctgttc

SEQ ID NO: 30452 - DNA, 20 bp, Artificial Sequence
  Description of Artificial Sequence: Synthetic oligonucleotide
  Target: COL7A1; (+) strand; PAM type: YTN; PAM sequence: CTG
ttctccagagagtccaggac

SEQ ID NO: 30453 - DNA, 20 bp, Artificial Sequence
  Description of Artificial Sequence: Synthetic oligonucleotide
  Target: COL7A1; (+) strand; PAM type: YTN; PAM sequence: TTC
tccagagagtccaggacctg

SEQ ID NO: 30454 - DNA, 20 bp, Artificial Sequence
  Description of Artificial Sequence: Synthetic oligonucleotide
  Target: COL7A1; (+) strand; PAM type: YTN; PAM sequence: CTC
cagagagtccaggacctggc

SEQ ID NO: 30455 - DNA, 20 bp, Artificial Sequence
  Description of Artificial Sequence: Synthetic oligonucleotide
  Target: COL7A1; (+) strand; PAM type: YTN; PAM sequence: CTG
gctcatccacagacacctac

SEQ ID NO: 30456 - DNA, 20 bp, Artificial Sequence
  Description of Artificial Sequence: Synthetic oligonucleotide
  Target: COL7A1; (+) strand; PAM type: YTN; PAM sequence: CTC
atccacagacacctacaaac

SEQ ID NO: 30457 - DNA, 20 bp, Artificial Sequence
  Description of Artificial Sequence: Synthetic oligonucleotide
  Target: COL7A1; (+) strand; PAM type: YTN; PAM sequence: CTA
caaacacaaggtcacagggg

SEQ ID NO: 30458 - DNA, 20 bp, Artificial Sequence
  Description of Artificial Sequence: Synthetic oligonucleotide
  Target: COL7A1; (+) strand; PAM type: YTN; PAM sequence: CTC
tgtcatagaggcatggggga

SEQ ID NO: 30459 - DNA, 20 bp, Artificial Sequence
  Description of Artificial Sequence: Synthetic oligonucleotide
  Target: COL7A1; (+) strand; PAM type: YTN; PAM sequence: CTG
tcatagaggcatgggggagt

SEQ ID NO: 30460 - DNA, 20 bp, Artificial Sequence
  Description of Artificial Sequence: Synthetic oligonucleotide
  Target: COL7A1; (+) strand; PAM type: YTN; PAM sequence: CTC
aggatcacagagggttatag

SEQ ID NO: 30461 - DNA, 20 bp, Artificial Sequence
  Description of Artificial Sequence: Synthetic oligonucleotide
  Target: COL7A1; (+) strand; PAM type: YTN; PAM sequence: TTA
tagggtcagaaattccaggg

SEQ ID NO: 30462 - DNA, 20 bp, Artificial Sequence
  Description of Artificial Sequence: Synthetic oligonucleotide
  Target: COL7A1; (+) strand; PAM type: YTN; PAM sequence: TTC
cagggttatggcacacacta

SEQ ID NO: 30463 - DNA, 20 bp, Artificial Sequence
  Description of Artificial Sequence: Synthetic oligonucleotide
  Target: COL7A1; (+) strand; PAM type: YTN; PAM sequence: TTA
tggcacacactaccatattt

SEQ ID NO: 30464 - DNA, 20 bp, Artificial Sequence
  Description of Artificial Sequence: Synthetic oligonucleotide
  Target: COL7A1; (+) strand; PAM type: YTN; PAM sequence: CTA
ccatatttctggggaccaag

SEQ ID NO: 30465 - DNA, 20 bp, Artificial Sequence
  Description of Artificial Sequence: Synthetic oligonucleotide
  Target: COL7A1; (+) strand; PAM type: YTN; PAM sequence: TTT
ctggggaccaagctaagggt

SEQ ID NO: 30466 - DNA, 20 bp, Artificial Sequence
  Description of Artificial Sequence: Synthetic oligonucleotide
  Target: COL7A1; (+) strand; PAM type: YTN; PAM sequence: TTC
tggggaccaagctaagggtg

SEQ ID NO: 30467 - DNA, 20 bp, Artificial Sequence
  Description of Artificial Sequence: Synthetic oligonucleotide
  Target: COL7A1; (+) strand; PAM type: YTN; PAM sequence: CTG
gggaccaagctaagggtggc

SEQ ID NO: 30468 - DNA, 20 bp, Artificial Sequence
  Description of Artificial Sequence: Synthetic oligonucleotide
  Target: COL7A1; (+) strand; PAM type: YTN; PAM sequence: CTA
agggtggcttcctggtcact

SEQ ID NO: 30469 - DNA, 20 bp, Artificial Sequence
  Description of Artificial Sequence: Synthetic oligonucleotide
  Target: COL7A1; (+) strand; PAM type: YTN; PAM sequence: CTT
cctggtcactagtcacagga

SEQ ID NO: 30470 - DNA, 20 bp, Artificial Sequence
  Description of Artificial Sequence: Synthetic oligonucleotide
  Target: COL7A1; (+) strand; PAM type: YTN; PAM sequence: TTC
ctggtcactagtcacaggac

SEQ ID NO: 30471 - DNA, 20 bp, Artificial Sequence
  Description of Artificial Sequence: Synthetic oligonucleotide
  Target: COL7A1; (+) strand; PAM type: YTN; PAM sequence: CTG
gtcactagtcacaggactaa

SEQ ID NO: 30472 - DNA, 20 bp, Artificial Sequence
  Description of Artificial Sequence: Synthetic oligonucleotide
  Target: COL7A1; (+) strand; PAM type: YTN; PAM sequence: CTA
gtcacaggactaaggcaggg

SEQ ID NO: 30473 - DNA, 20 bp, Artificial Sequence
  Description of Artificial Sequence: Synthetic oligonucleotide
  Target: COL7A1; (+) strand; PAM type: YTN; PAM sequence: CTA
aggcagggatggggtgatca

SEQ ID NO: 30474 - DNA, 20 bp, Artificial Sequence
  Description of Artificial Sequence: Synthetic oligonucleotide
  Target: COL7A1; (+) strand; PAM type: YTN; PAM sequence: CTT
ggggccagggggtccggggg

SEQ ID NO: 30475 - DNA, 20 bp, Artificial Sequence
  Description of Artificial Sequence: Synthetic oligonucleotide
  Target: COL7A1; (+) strand; PAM type: YTN; PAM sequence: TTG
gggccagggggtccgggggg

SEQ ID NO: 30476 - DNA, 20 bp, Artificial Sequence
  Description of Artificial Sequence: Synthetic oligonucleotide
  Target: COL7A1; (+) strand; PAM type: YTN; PAM sequence: TTC
cagggagtccaggagggcca

SEQ ID NO: 30477 - DNA, 20 bp, Artificial Sequence
  Description of Artificial Sequence: Synthetic oligonucleotide
  Target: COL7A1; (+) strand; PAM type: YTN; PAM sequence: CTC
tgccctgcaggaaacaagaa

SEQ ID NO: 30478 - DNA, 20 bp, Artificial Sequence
  Description of Artificial Sequence: Synthetic oligonucleotide
  Target: COL7A1; (+) strand; PAM type: YTN; PAM sequence: CTG
ccctgcaggaaacaagaaaa

SEQ ID NO: 30479 - DNA, 20 bp, Artificial Sequence
  Description of Artificial Sequence: Synthetic oligonucleotide
  Target: COL7A1; (+) strand; PAM type: YTN; PAM sequence: CTG
caggaaacaagaaaatgggg

SEQ ID NO: 30480 - DNA, 20 bp, Artificial Sequence
  Description of Artificial Sequence: Synthetic oligonucleotide
  Target: COL7A1; (+) strand; PAM type: YTN; PAM sequence: CTC
cagacagcctgccccacgaa

SEQ ID NO: 30481 - DNA, 20 bp, Artificial Sequence
  Description of Artificial Sequence: Synthetic oligonucleotide
  Target: COL7A1; (+) strand; PAM type: YTN; PAM sequence: CTG
ccccacgaagcccatcgcag

SEQ ID NO: 30482 - DNA, 20 bp, Artificial Sequence
  Description of Artificial Sequence: Synthetic oligonucleotide
  Target: COL7A1; (+) strand; PAM type: YTN; PAM sequence: CTG
ttctccacgttctcctttct

SEQ ID NO: 30483 - DNA, 20 bp, Artificial Sequence
  Description of Artificial Sequence: Synthetic oligonucleotide
  Target: COL7A1; (+) strand; PAM type: YTN; PAM sequence: TTC
tccacgttctcctttctctc

SEQ ID NO: 30484 - DNA, 20 bp, Artificial Sequence
  Description of Artificial Sequence: Synthetic oligonucleotide
  Target: COL7A1; (+) strand; PAM type: YTN; PAM sequence: CTC
cacgttctcctttctctccc

SEQ ID NO: 30485 - DNA, 20 bp, Artificial Sequence
  Description of Artificial Sequence: Synthetic oligonucleotide
  Target: COL7A1; (+) strand; PAM type: YTN; PAM sequence: TTC
tcctttctctccccgttctc

SEQ ID NO: 30486 - DNA, 20 bp, Artificial Sequence
  Description of Artificial Sequence: Synthetic oligonucleotide
  Target: COL7A1; (+) strand; PAM type: YTN; PAM sequence: CTC
ctttctctccccgttctccc

SEQ ID NO: 30487 - DNA, 20 bp, Artificial Sequence
  Description of Artificial Sequence: Synthetic oligonucleotide
  Target: COL7A1; (+) strand; PAM type: YTN; PAM sequence: CTT
tctctccccgttctccctga

SEQ ID NO: 30488 - DNA, 20 bp, Artificial Sequence
  Description of Artificial Sequence: Synthetic oligonucleotide
  Target: COL7A1; (+) strand; PAM type: YTN; PAM sequence: TTT
ctctccccgttctccctgaa

SEQ ID NO: 30489 - DNA, 20 bp, Artificial Sequence
  Description of Artificial Sequence: Synthetic oligonucleotide
  Target: COL7A1; (+) strand; PAM type: YTN; PAM sequence: TTC
tctccccgttctccctgaaa

SEQ ID NO: 30490 - DNA, 20 bp, Artificial Sequence
  Description of Artificial Sequence: Synthetic oligonucleotide
  Target: COL7A1; (+) strand; PAM type: YTN; PAM sequence: CTC
tccccgttctccctgaaatg

SEQ ID NO: 30491 - DNA, 20 bp, Artificial Sequence
  Description of Artificial Sequence: Synthetic oligonucleotide
  Target: COL7A1; (+) strand; PAM type: YTN; PAM sequence: CTC
cccgttctccctgaaatgca

SEQ ID NO: 30492 - DNA, 20 bp, Artificial Sequence
  Description of Artificial Sequence: Synthetic oligonucleotide
  Target: COL7A1; (+) strand; PAM type: YTN; PAM sequence: TTC
tccctgaaatgcaaatagcg

SEQ ID NO: 30493 - DNA, 20 bp, Artificial Sequence
  Description of Artificial Sequence: Synthetic oligonucleotide
  Target: COL7A1; (+) strand; PAM type: YTN; PAM sequence: CTC
cctgaaatgcaaatagcggg

SEQ ID NO: 30494 - DNA, 20 bp, Artificial Sequence
  Description of Artificial Sequence: Synthetic oligonucleotide
  Target: COL7A1; (+) strand; PAM type: YTN; PAM sequence: CTG
aaatgcaaatagcgggtgag

SEQ ID NO: 30495 - DNA, 20 bp, Artificial Sequence
  Description of Artificial Sequence: Synthetic oligonucleotide
  Target: COL7A1; (+) strand; PAM type: YTN; PAM sequence: CTC
ccaacccctcttccctcact

SEQ ID NO: 30496 - DNA, 20 bp, Artificial Sequence
  Description of Artificial Sequence: Synthetic oligonucleotide
  Target: COL7A1; (+) strand; PAM type: YTN; PAM sequence: CTC
ttccctcactctcctggcca

SEQ ID NO: 30497 - DNA, 20 bp, Artificial Sequence
  Description of Artificial Sequence: Synthetic oligonucleotide
  Target: COL7A1; (+) strand; PAM type: YTN; PAM sequence: CTT
ccctcactctcctggccagc

SEQ ID NO: 30498 - DNA, 20 bp, Artificial Sequence
  Description of Artificial Sequence: Synthetic oligonucleotide
  Target: COL7A1; (+) strand; PAM type: YTN; PAM sequence: TTC
cctcactctcctggccagcc

SEQ ID NO: 30499 - DNA, 20 bp, Artificial Sequence
  Description of Artificial Sequence: Synthetic oligonucleotide
  Target: COL7A1; (+) strand; PAM type: YTN; PAM sequence: CTC
actctcctggccagccccca

SEQ ID NO: 30500 - DNA, 20 bp, Artificial Sequence
  Description of Artificial Sequence: Synthetic oligonucleotide
  Target: COL7A1; (+) strand; PAM type: YTN; PAM sequence: CTC
tcctggccagcccccagcct

SEQ ID NO: 30501 - DNA, 20 bp, Artificial Sequence
  Description of Artificial Sequence: Synthetic oligonucleotide
  Target: COL7A1; (+) strand; PAM type: YTN; PAM sequence: CTC
ctggccagcccccagcctca

SEQ ID NO: 30502 - DNA, 20 bp, Artificial Sequence
  Description of Artificial Sequence: Synthetic oligonucleotide
  Target: COL7A1; (+) strand; PAM type: YTN; PAM sequence: CTG
gccagcccccagcctcaccc

SEQ ID NO: 30503 - DNA, 20 bp, Artificial Sequence
  Description of Artificial Sequence: Synthetic oligonucleotide
  Target: COL7A1; (+) strand; PAM type: YTN; PAM sequence: CTC
accctctctcctggccttcc

SEQ ID NO: 30504 - DNA, 20 bp, Artificial Sequence
  Description of Artificial Sequence: Synthetic oligonucleotide
  Target: COL7A1; (+) strand; PAM type: YTN; PAM sequence: CTC
tctcctggccttcctgcctc

SEQ ID NO: 30505 - DNA, 20 bp, Artificial Sequence
  Description of Artificial Sequence: Synthetic oligonucleotide
  Target: COL7A1; (+) strand; PAM type: YTN; PAM sequence: CTC
tcctggccttcctgcctctc

SEQ ID NO: 30506 - DNA, 20 bp, Artificial Sequence
  Description of Artificial Sequence: Synthetic oligonucleotide
  Target: COL7A1; (+) strand; PAM type: YTN; PAM sequence: CTC
ctggccttcctgcctctccc

SEQ ID NO: 30507 - DNA, 20 bp, Artificial Sequence
  Description of Artificial Sequence: Synthetic oligonucleotide
  Target: COL7A1; (+) strand; PAM type: YTN; PAM sequence: CTG
gccttcctgcctctcccaca

SEQ ID NO: 30508 - DNA, 20 bp, Artificial Sequence
  Description of Artificial Sequence: Synthetic oligonucleotide
  Target: COL7A1; (+) strand; PAM type: YTN; PAM sequence: CTT
cctgcctctcccacaccccc

SEQ ID NO: 30509 - DNA, 20 bp, Artificial Sequence
  Description of Artificial Sequence: Synthetic oligonucleotide
  Target: COL7A1; (+) strand; PAM type: YTN; PAM sequence: TTC
ctgcctctcccacaccccca

SEQ ID NO: 30510 - DNA, 20 bp, Artificial Sequence
  Description of Artificial Sequence: Synthetic oligonucleotide
  Target: COL7A1; (+) strand; PAM type: YTN; PAM sequence: CTG
cctctcccacacccccagcc

SEQ ID NO: 30511 - DNA, 20 bp, Artificial Sequence
  Description of Artificial Sequence: Synthetic oligonucleotide
  Target: COL7A1; (+) strand; PAM type: YTN; PAM sequence: CTC
tcccacacccccagccctgc

SEQ ID NO: 30512 - DNA, 20 bp, Artificial Sequence
  Description of Artificial Sequence: Synthetic oligonucleotide
  Target: COL7A1; (+) strand; PAM type: YTN; PAM sequence: CTC
ccacacccccagccctgcct

SEQ ID NO: 30513 - DNA, 20 bp, Artificial Sequence
  Description of Artificial Sequence: Synthetic oligonucleotide
  Target: COL7A1; (+) strand; PAM type: YTN; PAM sequence: CTG
cctgggagcccgggaatacc

SEQ ID NO: 30514 - DNA, 20 bp, Artificial Sequence
  Description of Artificial Sequence: Synthetic oligonucleotide
  Target: COL7A1; (+) strand; PAM type: YTN; PAM sequence: CTG
ggagcccgggaataccaggc

SEQ ID NO: 30515 - DNA, 20 bp, Artificial Sequence
  Description of Artificial Sequence: Synthetic oligonucleotide
  Target: COL7A1; (+) strand; PAM type: YTN; PAM sequence: CTT
tccaggctccccggcaaggc

SEQ ID NO: 30516 - DNA, 20 bp, Artificial Sequence
  Description of Artificial Sequence: Synthetic oligonucleotide
  Target: COL7A1; (+) strand; PAM type: YTN; PAM sequence: TTT
ccaggctccccggcaaggcc

SEQ ID NO: 30517 - DNA, 20 bp, Artificial Sequence
  Description of Artificial Sequence: Synthetic oligonucleotide
  Target: COL7A1; (+) strand; PAM type: YTN; PAM sequence: TTC
caggctccccggcaaggccg

SEQ ID NO: 30518 - DNA, 20 bp, Artificial Sequence
  Description of Artificial Sequence: Synthetic oligonucleotide
  Target: COL7A1; (+) strand; PAM type: YTN; PAM sequence: CTC
cccggcaaggccggaaggcc

SEQ ID NO: 30519 - DNA, 20 bp, Artificial Sequence
  Description of Artificial Sequence: Synthetic oligonucleotide
  Target: COL7A1; (+) strand; PAM type: YTN; PAM sequence: CTC
tccccaagggccagaccagg

SEQ ID NO: 30520 - DNA, 20 bp, Artificial Sequence
  Description of Artificial Sequence: Synthetic oligonucleotide
  Target: COL7A1; (+) strand; PAM type: YTN; PAM sequence: CTC
cccaagggccagaccaggtg

SEQ ID NO: 30521 - DNA, 20 bp, Artificial Sequence
  Description of Artificial Sequence: Synthetic oligonucleotide
  Target: COL7A1; (+) strand; PAM type: YTN; PAM sequence: CTG
agggccagggtctccacggt

SEQ ID NO: 30522 - DNA, 20 bp, Artificial Sequence
  Description of Artificial Sequence: Synthetic oligonucleotide
  Target: COL7A1; (+) strand; PAM type: YTN; PAM sequence: CTC
cacggtcgcccttcagcccg

SEQ ID NO: 30523 - DNA, 20 bp, Artificial Sequence
  Description of Artificial Sequence: Synthetic oligonucleotide
  Target: COL7A1; (+) strand; PAM type: YTN; PAM sequence: CTT
cagcccgcgttctccaggaa

SEQ ID NO: 30524 - DNA, 20 bp, Artificial Sequence
  Description of Artificial Sequence: Synthetic oligonucleotide
  Target: COL7A1; (+) strand; PAM type: YTN; PAM sequence: TTC
agcccgcgttctccaggaaa

SEQ ID NO: 30525 - DNA, 20 bp, Artificial Sequence
  Description of Artificial Sequence: Synthetic oligonucleotide
  Target: COL7A1; (+) strand; PAM type: YTN; PAM sequence: TTC
tccaggaaagccgatggggc

SEQ ID NO: 30526 - DNA, 20 bp, Artificial Sequence
  Description of Artificial Sequence: Synthetic oligonucleotide
  Target: COL7A1; (+) strand; PAM type: YTN; PAM sequence: CTC
caggaaagccgatggggccc

SEQ ID NO: 30527 - DNA, 20 bp, Artificial Sequence
  Description of Artificial Sequence: Synthetic oligonucleotide
  Target: COL7A1; (+) strand; PAM type: YTN; PAM sequence: CTG
caggagtggaagagagaatg

SEQ ID NO: 30528 - DNA, 20 bp, Artificial Sequence
  Description of Artificial Sequence: Synthetic oligonucleotide
  Target: COL7A1; (+) strand; PAM type: YTN; PAM sequence: CTG
gtggctgtacagctacaccc

SEQ ID NO: 30529 - DNA, 20 bp, Artificial Sequence
  Description of Artificial Sequence: Synthetic oligonucleotide
  Target: COL7A1; (+) strand; PAM type: YTN; PAM sequence: CTG
tacagctacaccccactcca

SEQ ID NO: 30530 - DNA, 20 bp, Artificial Sequence
  Description of Artificial Sequence: Synthetic oligonucleotide
  Target: COL7A1; (+) strand; PAM type: YTN; PAM sequence: CTA
caccccactccacggggcac

SEQ ID NO: 30531 - DNA, 20 bp, Artificial Sequence
  Description of Artificial Sequence: Synthetic oligonucleotide
  Target: COL7A1; (+) strand; PAM type: YTN; PAM sequence: CTC
cacggggcacaacccactga

SEQ ID NO: 30532 - DNA, 20 bp, Artificial Sequence
  Description of Artificial Sequence: Synthetic oligonucleotide
  Target: COL7A1; (+) strand; PAM type: YTN; PAM sequence: CTG
agccacttctgctcacctcc

SEQ ID NO: 30533 - DNA, 20 bp, Artificial Sequence
  Description of Artificial Sequence: Synthetic oligonucleotide
  Target: COL7A1; (+) strand; PAM type: YTN; PAM sequence: CTT
ctgctcacctccttgcctgg

SEQ ID NO: 30534 - DNA, 20 bp, Artificial Sequence
  Description of Artificial Sequence: Synthetic oligonucleotide
  Target: COL7A1; (+) strand; PAM type: YTN; PAM sequence: TTC
tgctcacctccttgcctggg

SEQ ID NO: 30535 - DNA, 20 bp, Artificial Sequence
  Description of Artificial Sequence: Synthetic oligonucleotide
  Target: COL7A1; (+) strand; PAM type: YTN; PAM sequence: CTG
ctcacctccttgcctggggg

SEQ ID NO: 30536 - DNA, 20 bp, Artificial Sequence
  Description of Artificial Sequence: Synthetic oligonucleotide
  Target: COL7A1; (+) strand; PAM type: YTN; PAM sequence: CTC
acctccttgcctggggggcc

SEQ ID NO: 30537 - DNA, 20 bp, Artificial Sequence
  Description of Artificial Sequence: Synthetic oligonucleotide
  Target: COL7A1; (+) strand; PAM type: YTN; PAM sequence: CTC
cttgcctggggggccctgtt

SEQ ID NO: 30538 - DNA, 20 bp, Artificial Sequence
  Description of Artificial Sequence: Synthetic oligonucleotide
  Target: COL7A1; (+) strand; PAM type: YTN; PAM sequence: CTT
gcctggggggccctgttcgc

SEQ ID NO: 30539 - DNA, 20 bp, Artificial Sequence
  Description of Artificial Sequence: Synthetic oligonucleotide
  Target: COL7A1; (+) strand; PAM type: YTN; PAM sequence: TTG
cctggggggccctgttcgcc

SEQ ID NO: 30540 - DNA, 20 bp, Artificial Sequence
  Description of Artificial Sequence: Synthetic oligonucleotide
  Target: COL7A1; (+) strand; PAM type: YTN; PAM sequence: CTG
gggggccctgttcgcctgag

SEQ ID NO: 30541 - DNA, 20 bp, Artificial Sequence
  Description of Artificial Sequence: Synthetic oligonucleotide
  Target: COL7A1; (+) strand; PAM type: YTN; PAM sequence: CTG
ttcgcctgagtcccccttgg

SEQ ID NO: 30542 - DNA, 20 bp, Artificial Sequence
  Description of Artificial Sequence: Synthetic oligonucleotide
  Target: COL7A1; (+) strand; PAM type: YTN; PAM sequence: TTC
gcctgagtcccccttggggc

SEQ ID NO: 30543 - DNA, 20 bp, Artificial Sequence
  Description of Artificial Sequence: Synthetic oligonucleotide
  Target: COL7A1; (+) strand; PAM type: YTN; PAM sequence: CTG
agtcccccttggggcctcga

SEQ ID NO: 30544 - DNA, 20 bp, Artificial Sequence
  Description of Artificial Sequence: Synthetic oligonucleotide
  Target: COL7A1; (+) strand; PAM type: YTN; PAM sequence: CTT
ggggcctcgacgccgttcgg

SEQ ID NO: 30545 - DNA, 20 bp, Artificial Sequence
  Description of Artificial Sequence: Synthetic oligonucleotide
  Target: COL7A1; (+) strand; PAM type: YTN; PAM sequence: TTG
gggcctcgacgccgttcggg

SEQ ID NO: 30546 - DNA, 20 bp, Artificial Sequence
  Description of Artificial Sequence: Synthetic oligonucleotide
  Target: COL7A1; (+) strand; PAM type: YTN; PAM sequence: CTC
gacgccgttcgggcacaggc

SEQ ID NO: 30547 - DNA, 20 bp, Artificial Sequence
  Description of Artificial Sequence: Synthetic oligonucleotide
  Target: COL7A1; (+) strand; PAM type: YTN; PAM sequence: TTC
gggcacaggcaggaagctac

SEQ ID NO: 30548 - DNA, 20 bp, Artificial Sequence
  Description of Artificial Sequence: Synthetic oligonucleotide
  Target: COL7A1; (+) strand; PAM type: YTN; PAM sequence: CTA
ccagagctctcatcccaggt

SEQ ID NO: 30549 - DNA, 20 bp, Artificial Sequence
  Description of Artificial Sequence: Synthetic oligonucleotide
  Target: COL7A1; (+) strand; PAM type: YTN; PAM sequence: CTC
tcatcccaggtctccacgat

SEQ ID NO: 30550 - DNA, 20 bp, Artificial Sequence
  Description of Artificial Sequence: Synthetic oligonucleotide
  Target: COL7A1; (+) strand; PAM type: YTN; PAM sequence: CTC
atcccaggtctccacgatct

SEQ ID NO: 30551 - DNA, 20 bp, Artificial Sequence
  Description of Artificial Sequence: Synthetic oligonucleotide
  Target: COL7A1; (+) strand; PAM type: YTN; PAM sequence: CTC
cacgatctcccgcagggcag

SEQ ID NO: 30552 - DNA, 20 bp, Artificial Sequence
  Description of Artificial Sequence: Synthetic oligonucleotide
  Target: COL7A1; (+) strand; PAM type: YTN; PAM sequence: CTC
ccgcagggcagatgcctgag

SEQ ID NO: 30553 - DNA, 20 bp, Artificial Sequence
  Description of Artificial Sequence: Synthetic oligonucleotide
  Target: COL7A1; (+) strand; PAM type: YTN; PAM sequence: CTG
agggacagcaagaggtcaga

SEQ ID NO: 30554 - DNA, 20 bp, Artificial Sequence
  Description of Artificial Sequence: Synthetic oligonucleotide
  Target: COL7A1; (+) strand; PAM type: YTN; PAM sequence: CTA
tgcctgtgggcaccactagc

SEQ ID NO: 30555 - DNA, 20 bp, Artificial Sequence
  Description of Artificial Sequence: Synthetic oligonucleotide
  Target: COL7A1; (+) strand; PAM type: YTN; PAM sequence: CTG
tgggcaccactagccccaag

SEQ ID NO: 30556 - DNA, 20 bp, Artificial Sequence
  Description of Artificial Sequence: Synthetic oligonucleotide
  Target: COL7A1; (+) strand; PAM type: YTN; PAM sequence: CTA
gccccaagggcccccacttg

SEQ ID NO: 30557 - DNA, 20 bp, Artificial Sequence
  Description of Artificial Sequence: Synthetic oligonucleotide
  Target: COL7A1; (+) strand; PAM type: YTN; PAM sequence: CTT
gtccctacccccagccccta

SEQ ID NO: 30558 - DNA, 20 bp, Artificial Sequence
  Description of Artificial Sequence: Synthetic oligonucleotide
  Target: COL7A1; (+) strand; PAM type: YTN; PAM sequence: TTG
tccctacccccagcccctaa

SEQ ID NO: 30559 - DNA, 20 bp, Artificial Sequence
  Description of Artificial Sequence: Synthetic oligonucleotide
  Target: COL7A1; (+) strand; PAM type: YTN; PAM sequence: CTA
cccccagcccctaaacaacc

SEQ ID NO: 30560 - DNA, 20 bp, Artificial Sequence
  Description of Artificial Sequence: Synthetic oligonucleotide
  Target: COL7A1; (+) strand; PAM type: YTN; PAM sequence: CTA
aacaacccaccttgatgcca

SEQ ID NO: 30561 - DNA, 20 bp, Artificial Sequence
  Description of Artificial Sequence: Synthetic oligonucleotide
  Target: COL7A1; (+) strand; PAM type: YTN; PAM sequence: CTT
gatgccagcagtttccagca

SEQ ID NO: 30562 - DNA, 20 bp, Artificial Sequence
  Description of Artificial Sequence: Synthetic oligonucleotide
  Target: COL7A1; (+) strand; PAM type: YTN; PAM sequence: TTG
atgccagcagtttccagcaa

SEQ ID NO: 30563 - DNA, 20 bp, Artificial Sequence
  Description of Artificial Sequence: Synthetic oligonucleotide
  Target: COL7A1; (+) strand; PAM type: YTN; PAM sequence: TTT
ccagcaaccgatccacattc

SEQ ID NO: 30564 - DNA, 20 bp, Artificial Sequence
  Description of Artificial Sequence: Synthetic oligonucleotide
  Target: COL7A1; (+) strand; PAM type: YTN; PAM sequence: TTC
cagcaaccgatccacattct

SEQ ID NO: 30565 - DNA, 20 bp, Artificial Sequence
  Description of Artificial Sequence: Synthetic oligonucleotide
  Target: COL7A1; (+) strand; PAM type: YTN; PAM sequence: TTC
tggggacaaagtctgggtga

SEQ ID NO: 30566 - DNA, 20 bp, Artificial Sequence
  Description of Artificial Sequence: Synthetic oligonucleotide
  Target: COL7A1; (+) strand; PAM type: YTN; PAM sequence: CTG
gggacaaagtctgggtgaag

SEQ ID NO: 30567 - DNA, 20 bp, Artificial Sequence
  Description of Artificial Sequence: Synthetic oligonucleotide
  Target: COL7A1; (+) strand; PAM type: YTN; PAM sequence: CTG
ggtgaagggctgcccatgac

SEQ ID NO: 30568 - DNA, 20 bp, Artificial Sequence
  Description of Artificial Sequence: Synthetic oligonucleotide
  Target: COL7A1; (+) strand; PAM type: YTN; PAM sequence: CTG
cccatgacagagaagctcct

SEQ ID NO: 30569 - DNA, 20 bp, Artificial Sequence
  Description of Artificial Sequence: Synthetic oligonucleotide
  Target: COL7A1; (+) strand; PAM type: YTN; PAM sequence: CTC
ctgccttctgccccgcacgg

SEQ ID NO: 30570 - DNA, 20 bp, Artificial Sequence
  Description of Artificial Sequence: Synthetic oligonucleotide
  Target: COL7A1; (+) strand; PAM type: YTN; PAM sequence: CTG
ccttctgccccgcacggcct

SEQ ID NO: 30571 - DNA, 20 bp, Artificial Sequence
  Description of Artificial Sequence: Synthetic oligonucleotide
  Target: COL7A1; (+) strand; PAM type: YTN; PAM sequence: CTT
ctgccccgcacggcctcagg

SEQ ID NO: 30572 - DNA, 20 bp, Artificial Sequence
  Description of Artificial Sequence: Synthetic oligonucleotide
  Target: COL7A1; (+) strand; PAM type: YTN; PAM sequence: TTC
tgccccgcacggcctcagga

SEQ ID NO: 30573 - DNA, 20 bp, Artificial Sequence
  Description of Artificial Sequence: Synthetic oligonucleotide
  Target: COL7A1; (+) strand; PAM type: YTN; PAM sequence: CTG
ccccgcacggcctcaggaaa

SEQ ID NO: 30574 - DNA, 20 bp, Artificial Sequence
  Description of Artificial Sequence: Synthetic oligonucleotide
  Target: COL7A1; (+) strand; PAM type: YTN; PAM sequence: CTC
aggaaagcaccttcacaccc

SEQ ID NO: 30575 - DNA, 20 bp, Artificial Sequence
  Description of Artificial Sequence: Synthetic oligonucleotide
  Target: COL7A1; (+) strand; PAM type: YTN; PAM sequence: CTT
cacacccttttccctaggcc

SEQ ID NO: 30576 - DNA, 20 bp, Artificial Sequence
  Description of Artificial Sequence: Synthetic oligonucleotide
  Target: COL7A1; (+) strand; PAM type: YTN; PAM sequence: TTC
acacccttttccctaggcct

SEQ ID NO: 30577 - DNA, 20 bp, Artificial Sequence
  Description of Artificial Sequence: Synthetic oligonucleotide
  Target: COL7A1; (+) strand; PAM type: YTN; PAM sequence: CTT
ttccctaggcctcttgccca

SEQ ID NO: 30578 - DNA, 20 bp, Artificial Sequence
  Description of Artificial Sequence: Synthetic oligonucleotide
  Target: COL7A1; (+) strand; PAM type: YTN; PAM sequence: TTT
tccctaggcctcttgcccag

SEQ ID NO: 30579 - DNA, 20 bp, Artificial Sequence
  Description of Artificial Sequence: Synthetic oligonucleotide
  Target: COL7A1; (+) strand; PAM type: YTN; PAM sequence: TTT
ccctaggcctcttgcccaga

SEQ ID NO: 30580 - DNA, 20 bp, Artificial Sequence
  Description of Artificial Sequence: Synthetic oligonucleotide
  Target: COL7A1; (+) strand; PAM type: YTN; PAM sequence: TTC
cctaggcctcttgcccagag

SEQ ID NO: 30581 - DNA, 20 bp, Artificial Sequence
  Description of Artificial Sequence: Synthetic oligonucleotide
  Target: COL7A1; (+) strand; PAM type: YTN; PAM sequence: CTA
ggcctcttgcccagagcacc

SEQ ID NO: 30582 - DNA, 20 bp, Artificial Sequence
  Description of Artificial Sequence: Synthetic oligonucleotide
  Target: COL7A1; (+) strand; PAM type: YTN; PAM sequence: CTC
ttgcccagagcaccctttag

SEQ ID NO: 30583 - DNA, 20 bp, Artificial Sequence
  Description of Artificial Sequence: Synthetic oligonucleotide
  Target: COL7A1; (+) strand; PAM type: YTN; PAM sequence: CTT
gcccagagcaccctttagca

SEQ ID NO: 30584 - DNA, 20 bp, Artificial Sequence
  Description of Artificial Sequence: Synthetic oligonucleotide
  Target: COL7A1; (+) strand; PAM type: YTN; PAM sequence: TTG
cccagagcaccctttagcac

SEQ ID NO: 30585 - DNA, 20 bp, Artificial Sequence
  Description of Artificial Sequence: Synthetic oligonucleotide
  Target: COL7A1; (+) strand; PAM type: YTN; PAM sequence: CTT
tagcacttggttgaggcatg

SEQ ID NO: 30586 - DNA, 20 bp, Artificial Sequence
  Description of Artificial Sequence: Synthetic oligonucleotide
  Target: COL7A1; (+) strand; PAM type: YTN; PAM sequence: TTT
agcacttggttgaggcatgg

SEQ ID NO: 30587 - DNA, 20 bp, Artificial Sequence
  Description of Artificial Sequence: Synthetic oligonucleotide
  Target: COL7A1; (+) strand; PAM type: YTN; PAM sequence: TTA
gcacttggttgaggcatggc

SEQ ID NO: 30588 - DNA, 20 bp, Artificial Sequence
  Description of Artificial Sequence: Synthetic oligonucleotide
  Target: COL7A1; (+) strand; PAM type: YTN; PAM sequence: CTT
ggttgaggcatggctggaga

SEQ ID NO: 30589 - DNA, 20 bp, Artificial Sequence
  Description of Artificial Sequence: Synthetic oligonucleotide
  Target: COL7A1; (+) strand; PAM type: YTN; PAM sequence: TTG
gttgaggcatggctggagac

SEQ ID NO: 30590 - DNA, 20 bp, Artificial Sequence
  Description of Artificial Sequence: Synthetic oligonucleotide
  Target: COL7A1; (+) strand; PAM type: YTN; PAM sequence: TTG
aggcatggctggagactcct

SEQ ID NO: 30591 - DNA, 20 bp, Artificial Sequence
  Description of Artificial Sequence: Synthetic oligonucleotide
  Target: COL7A1; (+) strand; PAM type: YTN; PAM sequence: CTG
gagactcctgggagcccctt

SEQ ID NO: 30592 - DNA, 20 bp, Artificial Sequence
  Description of Artificial Sequence: Synthetic oligonucleotide
  Target: COL7A1; (+) strand; PAM type: YTN; PAM sequence: CTC
ctgggagcccctttctggtg

SEQ ID NO: 30593 - DNA, 20 bp, Artificial Sequence
  Description of Artificial Sequence: Synthetic oligonucleotide
  Target: COL7A1; (+) strand; PAM type: YTN; PAM sequence: CTG
ggagcccctttctggtgtgt

SEQ ID NO: 30594 - DNA, 20 bp, Artificial Sequence
  Description of Artificial Sequence: Synthetic oligonucleotide
  Target: COL7A1; (+) strand; PAM type: YTN; PAM sequence: CTT
tctggtgtgtccccactgcc

SEQ ID NO: 30595 - DNA, 20 bp, Artificial Sequence
  Description of Artificial Sequence: Synthetic oligonucleotide
  Target: COL7A1; (+) strand; PAM type: YTN; PAM sequence: TTT
ctggtgtgtccccactgccc

SEQ ID NO: 30596 - DNA, 20 bp, Artificial Sequence
  Description of Artificial Sequence: Synthetic oligonucleotide
  Target: COL7A1; (+) strand; PAM type: YTN; PAM sequence: TTC
tggtgtgtccccactgccca

SEQ ID NO: 30597 - DNA, 20 bp, Artificial Sequence
  Description of Artificial Sequence: Synthetic oligonucleotide
  Target: COL7A1; (+) strand; PAM type: YTN; PAM sequence: CTG
gtgtgtccccactgcccaag

SEQ ID NO: 30598 - DNA, 20 bp, Artificial Sequence
  Description of Artificial Sequence: Synthetic oligonucleotide
  Target: COL7A1; (+) strand; PAM type: YTN; PAM sequence: CTG
cccaagttcccttgagtgtg

SEQ ID NO: 30599 - DNA, 20 bp, Artificial Sequence
  Description of Artificial Sequence: Synthetic oligonucleotide
  Target: COL7A1; (+) strand; PAM type: YTN; PAM sequence: TTC
ccttgagtgtgggctacaag

SEQ ID NO: 30600 - DNA, 20 bp, Artificial Sequence
  Description of Artificial Sequence: Synthetic oligonucleotide
  Target: COL7A1; (+) strand; PAM type: YTN; PAM sequence: CTT
gagtgtgggctacaagaacc

SEQ ID NO: 30601 - DNA, 20 bp, Artificial Sequence
  Description of Artificial Sequence: Synthetic oligonucleotide
  Target: COL7A1; (+) strand; PAM type: YTN; PAM sequence: TTG
agtgtgggctacaagaaccc

SEQ ID NO: 30602 - DNA, 20 bp, Artificial Sequence
  Description of Artificial Sequence: Synthetic oligonucleotide
  Target: COL7A1; (+) strand; PAM type: YTN; PAM sequence: CTA
caagaaccccaatggggcag

SEQ ID NO: 30603 - DNA, 20 bp, Artificial Sequence
  Description of Artificial Sequence: Synthetic oligonucleotide
  Target: COL7A1; (+) strand; PAM type: YTN; PAM sequence: CTG
aacacacagcacagaaccta

SEQ ID NO: 30604 - DNA, 20 bp, Artificial Sequence
  Description of Artificial Sequence: Synthetic oligonucleotide
  Target: COL7A1; (+) strand; PAM type: YTN; PAM sequence: CTA
tggagcctcatggcaagggg

SEQ ID NO: 30605 - DNA, 20 bp, Artificial Sequence
  Description of Artificial Sequence: Synthetic oligonucleotide
  Target: COL7A1; (+) strand; PAM type: YTN; PAM sequence: CTC
atggcaaggggaaggggatg

SEQ ID NO: 30606 - DNA, 20 bp, Artificial Sequence
  Description of Artificial Sequence: Synthetic oligonucleotide
  Target: COL7A1; (+) strand; PAM type: YTN; PAM sequence: CTG
gctcaccggcacacttccag

SEQ ID NO: 30607 - DNA, 20 bp, Artificial Sequence
  Description of Artificial Sequence: Synthetic oligonucleotide
  Target: COL7A1; (+) strand; PAM type: YTN; PAM sequence: CTC
accggcacacttccaggctc

SEQ ID NO: 30608 - DNA, 20 bp, Artificial Sequence
  Description of Artificial Sequence: Synthetic oligonucleotide
  Target: COL7A1; (+) strand; PAM type: YTN; PAM sequence: CTT
ccaggctctcctcgcaggcc

SEQ ID NO: 30609 - DNA, 20 bp, Artificial Sequence
  Description of Artificial Sequence: Synthetic oligonucleotide
  Target: COL7A1; (+) strand; PAM type: YTN; PAM sequence: TTC
caggctctcctcgcaggcca

SEQ ID NO: 30610 - DNA, 20 bp, Artificial Sequence
  Description of Artificial Sequence: Synthetic oligonucleotide
  Target: COL7A1; (+) strand; PAM type: YTN; PAM sequence: CTC
tcctcgcaggccacgctctc

SEQ ID NO: 30611 - DNA, 20 bp, Artificial Sequence
  Description of Artificial Sequence: Synthetic oligonucleotide
  Target: COL7A1; (+) strand; PAM type: YTN; PAM sequence: CTC
ctcgcaggccacgctctcca

SEQ ID NO: 30612 - DNA, 20 bp, Artificial Sequence
  Description of Artificial Sequence: Synthetic oligonucleotide
  Target: COL7A1; (+) strand; PAM type: YTN; PAM sequence: CTC
gcaggccacgctctccaggg

SEQ ID NO: 30613 - DNA, 20 bp, Artificial Sequence
  Description of Artificial Sequence: Synthetic oligonucleotide
  Target: COL7A1; (+) strand; PAM type: YTN; PAM sequence: CTC
tccagggaggccctggagag

SEQ ID NO: 30614 - DNA, 20 bp, Artificial Sequence
  Description of Artificial Sequence: Synthetic oligonucleotide
  Target: COL7A1; (+) strand; PAM type: YTN; PAM sequence: CTC
cagggaggccctggagagat

SEQ ID NO: 30615 - DNA, 20 bp, Artificial Sequence
  Description of Artificial Sequence: Synthetic oligonucleotide
  Target: COL7A1; (+) strand; PAM type: YTN; PAM sequence: CTG
gagagatgaagacaaactgc

SEQ ID NO: 30616 - DNA, 20 bp, Artificial Sequence
  Description of Artificial Sequence: Synthetic oligonucleotide
  Target: COL7A1; (+) strand; PAM type: YTN; PAM sequence: CTG
ctaggaaccagcctatgggt

SEQ ID NO: 30617 - DNA, 20 bp, Artificial Sequence
  Description of Artificial Sequence: Synthetic oligonucleotide
  Target: COL7A1; (+) strand; PAM type: YTN; PAM sequence: CTA
ggaaccagcctatgggtgtg

SEQ ID NO: 30618 - DNA, 20 bp, Artificial Sequence
  Description of Artificial Sequence: Synthetic oligonucleotide
  Target: COL7A1; (+) strand; PAM type: YTN; PAM sequence: CTA
tgggtgtgcatgtgcacatg

SEQ ID NO: 30619 - DNA, 20 bp, Artificial Sequence
  Description of Artificial Sequence: Synthetic oligonucleotide
  Target: COL7A1; (+) strand; PAM type: YTN; PAM sequence: CTG
tggctacctgggcatgtgga

SEQ ID NO: 30620 - DNA, 20 bp, Artificial Sequence
  Description of Artificial Sequence: Synthetic oligonucleotide
  Target: COL7A1; (+) strand; PAM type: YTN; PAM sequence: CTA
cctgggcatgtggaaaaggt

SEQ ID NO: 30621 - DNA, 20 bp, Artificial Sequence
  Description of Artificial Sequence: Synthetic oligonucleotide
  Target: COL7A1; (+) strand; PAM type: YTN; PAM sequence: CTG
ggcatgtggaaaaggtgggg

SEQ ID NO: 30622 - DNA, 20 bp, Artificial Sequence
  Description of Artificial Sequence: Synthetic oligonucleotide
  Target: COL7A1; (+) strand; PAM type: YTN; PAM sequence: CTC
acctgctcccctttggatcc

SEQ ID NO: 30623 - DNA, 20 bp, Artificial Sequence
  Description of Artificial Sequence: Synthetic oligonucleotide
  Target: COL7A1; (+) strand; PAM type: YTN; PAM sequence: CTG
ctcccctttggatccagtct

SEQ ID NO: 30624 - DNA, 20 bp, Artificial Sequence
  Description of Artificial Sequence: Synthetic oligonucleotide
  Target: COL7A1; (+) strand; PAM type: YTN; PAM sequence: CTC
ccctttggatccagtctccc

SEQ ID NO: 30625 - DNA, 20 bp, Artificial Sequence
  Description of Artificial Sequence: Synthetic oligonucleotide
  Target: COL7A1; (+) strand; PAM type: YTN; PAM sequence: CTT
tggatccagtctccccacgg

SEQ ID NO: 30626 - DNA, 20 bp, Artificial Sequence
  Description of Artificial Sequence: Synthetic oligonucleotide
  Target: COL7A1; (+) strand; PAM type: YTN; PAM sequence: TTT
ggatccagtctccccacggt

SEQ ID NO: 30627 - DNA, 20 bp, Artificial Sequence
  Description of Artificial Sequence: Synthetic oligonucleotide
  Target: COL7A1; (+) strand; PAM type: YTN; PAM sequence: TTG
gatccagtctccccacggtc

SEQ ID NO: 30628 - DNA, 20 bp, Artificial Sequence
  Description of Artificial Sequence: Synthetic oligonucleotide
  Target: COL7A1; (+) strand; PAM type: YTN; PAM sequence: CTC
cccacggtcaccctgaaaac

SEQ ID NO: 30629 - DNA, 20 bp, Artificial Sequence
  Description of Artificial Sequence: Synthetic oligonucleotide
  Target: COL7A1; (+) strand; PAM type: YTN; PAM sequence: CTG
aaaacaagaatgaccaggtg

SEQ ID NO: 30630 - DNA, 20 bp, Artificial Sequence
  Description of Artificial Sequence: Synthetic oligonucleotide
  Target: COL7A1; (+) strand; PAM type: YTN; PAM sequence: CTG
gtcagccccctcaccacgcc

SEQ ID NO: 30631 - DNA, 20 bp, Artificial Sequence
  Description of Artificial Sequence: Synthetic oligonucleotide
  Target: COL7A1; (+) strand; PAM type: YTN; PAM sequence: CTC
accacgccccctacccaaca

SEQ ID NO: 30632 - DNA, 20 bp, Artificial Sequence
  Description of Artificial Sequence: Synthetic oligonucleotide
  Target: COL7A1; (+) strand; PAM type: YTN; PAM sequence: CTA
cccaacatccgcactcacct

SEQ ID NO: 30633 - DNA, 20 bp, Artificial Sequence
  Description of Artificial Sequence: Synthetic oligonucleotide
  Target: COL7A1; (+) strand; PAM type: YTN; PAM sequence: CTC
accttggggcccgtgcctcc

SEQ ID NO: 30634 - DNA, 20 bp, Artificial Sequence
  Description of Artificial Sequence: Synthetic oligonucleotide
  Target: COL7A1; (+) strand; PAM type: YTN; PAM sequence: CTT
ggggcccgtgcctcctggga

SEQ ID NO: 30635 - DNA, 20 bp, Artificial Sequence
  Description of Artificial Sequence: Synthetic oligonucleotide
  Target: COL7A1; (+) strand; PAM type: YTN; PAM sequence: TTG
gggcccgtgcctcctgggac

SEQ ID NO: 30636 - DNA, 20 bp, Artificial Sequence
  Description of Artificial Sequence: Synthetic oligonucleotide
  Target: COL7A1; (+) strand; PAM type: YTN; PAM sequence: CTC
ctgggacaccaggaaaaccc

SEQ ID NO: 30637 - DNA, 20 bp, Artificial Sequence
  Description of Artificial Sequence: Synthetic oligonucleotide
  Target: COL7A1; (+) strand; PAM type: YTN; PAM sequence: CTG
ggacaccaggaaaaccctga

SEQ ID NO: 30638 - DNA, 20 bp, Artificial Sequence
  Description of Artificial Sequence: Synthetic oligonucleotide
  Target: COL7A1; (+) strand; PAM type: YTN; PAM sequence: CTG
agatacggcagaacacaaag

SEQ ID NO: 30639 - DNA, 20 bp, Artificial Sequence
  Description of Artificial Sequence: Synthetic oligonucleotide
  Target: COL7A1; (+) strand; PAM type: YTN; PAM sequence: CTT
cccaggagggttgcccattg

SEQ ID NO: 30640 - DNA, 20 bp, Artificial Sequence
  Description of Artificial Sequence: Synthetic oligonucleotide
  Target: COL7A1; (+) strand; PAM type: YTN; PAM sequence: TTC
ccaggagggttgcccattga

SEQ ID NO: 30641 - DNA, 20 bp, Artificial Sequence
  Description of Artificial Sequence: Synthetic oligonucleotide
  Target: COL7A1; (+) strand; PAM type: YTN; PAM sequence: TTG
cccattgaaacatcatggct

SEQ ID NO: 30642 - DNA, 20 bp, Artificial Sequence
  Description of Artificial Sequence: Synthetic oligonucleotide
  Target: COL7A1; (+) strand; PAM type: YTN; PAM sequence: TTG
aaacatcatggcttctaatg

SEQ ID NO: 30643 - DNA, 20 bp, Artificial Sequence
  Description of Artificial Sequence: Synthetic oligonucleotide
  Target: COL7A1; (+) strand; PAM type: YTN; PAM sequence: CTT
ctaatgctctgaagtcccag

SEQ ID NO: 30644 - DNA, 20 bp, Artificial Sequence
  Description of Artificial Sequence: Synthetic oligonucleotide
  Target: COL7A1; (+) strand; PAM type: YTN; PAM sequence: TTC
taatgctctgaagtcccaga

SEQ ID NO: 30645 - DNA, 20 bp, Artificial Sequence
  Description of Artificial Sequence: Synthetic oligonucleotide
  Target: COL7A1; (+) strand; PAM type: YTN; PAM sequence: CTA
atgctctgaagtcccagaat

SEQ ID NO: 30646 - DNA, 20 bp, Artificial Sequence
  Description of Artificial Sequence: Synthetic oligonucleotide
  Target: COL7A1; (+) strand; PAM type: YTN; PAM sequence: CTC
tgaagtcccagaatgaccca

SEQ ID NO: 30647 - DNA, 20 bp, Artificial Sequence
  Description of Artificial Sequence: Synthetic oligonucleotide
  Target: COL7A1; (+) strand; PAM type: YTN; PAM sequence: CTG
aagtcccagaatgacccagg

SEQ ID NO: 30648 - DNA, 20 bp, Artificial Sequence
  Description of Artificial Sequence: Synthetic oligonucleotide
  Target: COL7A1; (+) strand; PAM type: YTN; PAM sequence: CTC
acctggccaggagggcccac

SEQ ID NO: 30649 - DNA, 20 bp, Artificial Sequence
  Description of Artificial Sequence: Synthetic oligonucleotide
  Target: COL7A1; (+) strand; PAM type: YTN; PAM sequence: CTG
gccaggagggcccactggcc

SEQ ID NO: 30650 - DNA, 20 bp, Artificial Sequence
  Description of Artificial Sequence: Synthetic oligonucleotide
  Target: COL7A1; (+) strand; PAM type: YTN; PAM sequence: CTG
gccctgggaggcctggaggc

SEQ ID NO: 30651 - DNA, 20 bp, Artificial Sequence
  Description of Artificial Sequence: Synthetic oligonucleotide
  Target: COL7A1; (+) strand; PAM type: YTN; PAM sequence: CTG
ggaggcctggaggcccctgg

SEQ ID NO: 30652 - DNA, 20 bp, Artificial Sequence
  Description of Artificial Sequence: Synthetic oligonucleotide
  Target: COL7A1; (+) strand; PAM type: YTN; PAM sequence: CTG
gaggcccctggggtccaagg

SEQ ID NO: 30653 - DNA, 20 bp, Artificial Sequence
  Description of Artificial Sequence: Synthetic oligonucleotide
  Target: COL7A1; (+) strand; PAM type: YTN; PAM sequence: CTG
gggtccaaggataccaggag

SEQ ID NO: 30654 - DNA, 20 bp, Artificial Sequence
  Description of Artificial Sequence: Synthetic oligonucleotide
  Target: COL7A1; (+) strand; PAM type: YTN; PAM sequence: CTC
cacgctcacccttggggcca

SEQ ID NO: 30655 - DNA, 20 bp, Artificial Sequence
  Description of Artificial Sequence: Synthetic oligonucleotide
  Target: COL7A1; (+) strand; PAM type: YTN; PAM sequence: CTC
acccttggggccatcacgac

SEQ ID NO: 30656 - DNA, 20 bp, Artificial Sequence
  Description of Artificial Sequence: Synthetic oligonucleotide
  Target: COL7A1; (+) strand; PAM type: YTN; PAM sequence: CTT
ggggccatcacgaccctgtg

SEQ ID NO: 30657 - DNA, 20 bp, Artificial Sequence
  Description of Artificial Sequence: Synthetic oligonucleotide
  Target: COL7A1; (+) strand; PAM type: YTN; PAM sequence: TTG
gggccatcacgaccctgtga

SEQ ID NO: 30658 - DNA, 20 bp, Artificial Sequence
  Description of Artificial Sequence: Synthetic oligonucleotide
  Target: COL7A1; (+) strand; PAM type: YTN; PAM sequence: CTG
tgaaggatgcagccagcatc

SEQ ID NO: 30659 - DNA, 20 bp, Artificial Sequence
  Description of Artificial Sequence: Synthetic oligonucleotide
  Target: COL7A1; (+) strand; PAM type: YTN; PAM sequence: CTG
agacctcagaaaagagtgga

SEQ ID NO: 30660 - DNA, 20 bp, Artificial Sequence
  Description of Artificial Sequence: Synthetic oligonucleotide
  Target: COL7A1; (+) strand; PAM type: YTN; PAM sequence: CTC
agaaaagagtggagtcatat

SEQ ID NO: 30661 - DNA, 20 bp, Artificial Sequence
  Description of Artificial Sequence: Synthetic oligonucleotide
  Target: COL7A1; (+) strand; PAM type: YTN; PAM sequence: TTC
ccccagggtcagggtcaggg

SEQ ID NO: 30662 - DNA, 20 bp, Artificial Sequence
  Description of Artificial Sequence: Synthetic oligonucleotide
  Target: COL7A1; (+) strand; PAM type: YTN; PAM sequence: TTG
cagaaaactccaatactcac

SEQ ID NO: 30663 - DNA, 20 bp, Artificial Sequence
  Description of Artificial Sequence: Synthetic oligonucleotide
  Target: COL7A1; (+) strand; PAM type: YTN; PAM sequence: CTC
caatactcacttctctccca

SEQ ID NO: 30664 - DNA, 20 bp, Artificial Sequence
  Description of Artificial Sequence: Synthetic oligonucleotide
  Target: COL7A1; (+) strand; PAM type: YTN; PAM sequence: CTC
acttctctcccagaggcgcc

SEQ ID NO: 30665 - DNA, 20 bp, Artificial Sequence
  Description of Artificial Sequence: Synthetic oligonucleotide
  Target: COL7A1; (+) strand; PAM type: YTN; PAM sequence: CTT
ctctcccagaggcgcctgaa

SEQ ID NO: 30666 - DNA, 20 bp, Artificial Sequence
  Description of Artificial Sequence: Synthetic oligonucleotide
  Target: COL7A1; (+) strand; PAM type: YTN; PAM sequence: TTC
tctcccagaggcgcctgaat

SEQ ID NO: 30667 - DNA, 20 bp, Artificial Sequence
  Description of Artificial Sequence: Synthetic oligonucleotide
  Target: COL7A1; (+) strand; PAM type: YTN; PAM sequence: CTC
tcccagaggcgcctgaatct

SEQ ID NO: 30668 - DNA, 20 bp, Artificial Sequence
  Description of Artificial Sequence: Synthetic oligonucleotide
  Target: COL7A1; (+) strand; PAM type: YTN; PAM sequence: CTC
ccagaggcgcctgaatctcc

SEQ ID NO: 30669 - DNA, 20 bp, Artificial Sequence
  Description of Artificial Sequence: Synthetic oligonucleotide
  Target: COL7A1; (+) strand; PAM type: YTN; PAM sequence: CTG
aatctcctttctctccctaa

SEQ ID NO: 30670 - DNA, 20 bp, Artificial Sequence
  Description of Artificial Sequence: Synthetic oligonucleotide
  Target: COL7A1; (+) strand; PAM type: YTN; PAM sequence: CTC
ctttctctccctaaggaaga

SEQ ID NO: 30671 - DNA, 20 bp, Artificial Sequence
  Description of Artificial Sequence: Synthetic oligonucleotide
  Target: COL7A1; (+) strand; PAM type: YTN; PAM sequence: CTT
tctctccctaaggaagacaa

SEQ ID NO: 30672 - DNA, 20 bp, Artificial Sequence
  Description of Artificial Sequence: Synthetic oligonucleotide
  Target: COL7A1; (+) strand; PAM type: YTN; PAM sequence: TTT
ctctccctaaggaagacaag

SEQ ID NO: 30673 - DNA, 20 bp, Artificial Sequence
  Description of Artificial Sequence: Synthetic oligonucleotide
  Target: COL7A1; (+) strand; PAM type: YTN; PAM sequence: TTC
tctccctaaggaagacaagg

SEQ ID NO: 30674 - DNA, 20 bp, Artificial Sequence
  Description of Artificial Sequence: Synthetic oligonucleotide
  Target: COL7A1; (+) strand; PAM type: YTN; PAM sequence: CTC
tccctaaggaagacaaggat

SEQ ID NO: 30675 - DNA, 20 bp, Artificial Sequence
  Description of Artificial Sequence: Synthetic oligonucleotide
  Target: COL7A1; (+) strand; PAM type: YTN; PAM sequence: CTC
cctaaggaagacaaggatgc

SEQ ID NO: 30676 - DNA, 20 bp, Artificial Sequence
  Description of Artificial Sequence: Synthetic oligonucleotide
  Target: COL7A1; (+) strand; PAM type: YTN; PAM sequence: CTA
aggaagacaaggatgcttca

SEQ ID NO: 30677 - DNA, 20 bp, Artificial Sequence
  Description of Artificial Sequence: Synthetic oligonucleotide
  Target: COL7A1; (+) strand; PAM type: YTN; PAM sequence: CTT
caggcatggctccaagcaga

SEQ ID NO: 30678 - DNA, 20 bp, Artificial Sequence
  Description of Artificial Sequence: Synthetic oligonucleotide
  Target: COL7A1; (+) strand; PAM type: YTN; PAM sequence: TTC
aggcatggctccaagcagag

SEQ ID NO: 30679 - DNA, 20 bp, Artificial Sequence
  Description of Artificial Sequence: Synthetic oligonucleotide
  Target: COL7A1; (+) strand; PAM type: YTN; PAM sequence: CTC
caagcagagaccagagagac

SEQ ID NO: 30680 - DNA, 20 bp, Artificial Sequence
  Description of Artificial Sequence: Synthetic oligonucleotide
  Target: COL7A1; (+) strand; PAM type: YTN; PAM sequence: CTT
taccttcctcccgtcttctc

SEQ ID NO: 30681 - DNA, 20 bp, Artificial Sequence
  Description of Artificial Sequence: Synthetic oligonucleotide
  Target: COL7A1; (+) strand; PAM type: YTN; PAM sequence: TTT
accttcctcccgtcttctcc

SEQ ID NO: 30682 - DNA, 20 bp, Artificial Sequence
  Description of Artificial Sequence: Synthetic oligonucleotide
  Target: COL7A1; (+) strand; PAM type: YTN; PAM sequence: TTA
ccttcctcccgtcttctcca

SEQ ID NO: 30683 - DNA, 20 bp, Artificial Sequence
  Description of Artificial Sequence: Synthetic oligonucleotide
  Target: COL7A1; (+) strand; PAM type: YTN; PAM sequence: CTT
cctcccgtcttctccagggt

SEQ ID NO: 30684 - DNA, 20 bp, Artificial Sequence
  Description of Artificial Sequence: Synthetic oligonucleotide
  Target: COL7A1; (+) strand; PAM type: YTN; PAM sequence: TTC
ctcccgtcttctccagggtc

SEQ ID NO: 30685 - DNA, 20 bp, Artificial Sequence
  Description of Artificial Sequence: Synthetic oligonucleotide
  Target: COL7A1; (+) strand; PAM type: YTN; PAM sequence: CTC
ccgtcttctccagggtcccc

SEQ ID NO: 30686 - DNA, 20 bp, Artificial Sequence
  Description of Artificial Sequence: Synthetic oligonucleotide
  Target: COL7A1; (+) strand; PAM type: YTN; PAM sequence: CTT
ctccagggtccccaggttct

SEQ ID NO: 30687 - DNA, 20 bp, Artificial Sequence
  Description of Artificial Sequence: Synthetic oligonucleotide
  Target: COL7A1; (+) strand; PAM type: YTN; PAM sequence: TTC
tccagggtccccaggttctc

SEQ ID NO: 30688 - DNA, 20 bp, Artificial Sequence
  Description of Artificial Sequence: Synthetic oligonucleotide
  Target: COL7A1; (+) strand; PAM type: YTN; PAM sequence: CTC
cagggtccccaggttctccc

SEQ ID NO: 30689 - DNA, 20 bp, Artificial Sequence
  Description of Artificial Sequence: Synthetic oligonucleotide
  Target: COL7A1; (+) strand; PAM type: YTN; PAM sequence: TTC
tccctgtgggcagaggactc

SEQ ID NO: 30690 - DNA, 20 bp, Artificial Sequence
  Description of Artificial Sequence: Synthetic oligonucleotide
  Target: COL7A1; (+) strand; PAM type: YTN; PAM sequence: CTC
cctgtgggcagaggactcac

SEQ ID NO: 30691 - DNA, 20 bp, Artificial Sequence
  Description of Artificial Sequence: Synthetic oligonucleotide
  Target: COL7A1; (+) strand; PAM type: YTN; PAM sequence: CTG
tgggcagaggactcacatca

SEQ ID NO: 30692 - DNA, 20 bp, Artificial Sequence
  Description of Artificial Sequence: Synthetic oligonucleotide
  Target: COL7A1; (+) strand; PAM type: YTN; PAM sequence: CTC
acatcagcccaaacattcac

SEQ ID NO: 30693 - DNA, 20 bp, Artificial Sequence
  Description of Artificial Sequence: Synthetic oligonucleotide
  Target: COL7A1; (+) strand; PAM type: YTN; PAM sequence: TTC
actggtgtctggctgcaaga

SEQ ID NO: 30694 - DNA, 20 bp, Artificial Sequence
  Description of Artificial Sequence: Synthetic oligonucleotide
  Target: COL7A1; (+) strand; PAM type: YTN; PAM sequence: CTG
gtgtctggctgcaagacact

SEQ ID NO: 30695 - DNA, 20 bp, Artificial Sequence
  Description of Artificial Sequence: Synthetic oligonucleotide
  Target: COL7A1; (+) strand; PAM type: YTN; PAM sequence: CTG
gctgcaagacactaccttgc

SEQ ID NO: 30696 - DNA, 20 bp, Artificial Sequence
  Description of Artificial Sequence: Synthetic oligonucleotide
  Target: COL7A1; (+) strand; PAM type: YTN; PAM sequence: CTG
caagacactaccttgctaga

SEQ ID NO: 30697 - DNA, 20 bp, Artificial Sequence
  Description of Artificial Sequence: Synthetic oligonucleotide
  Target: COL7A1; (+) strand; PAM type: YTN; PAM sequence: CTA
ccttgctagatttcagatga

SEQ ID NO: 30698 - DNA, 20 bp, Artificial Sequence
  Description of Artificial Sequence: Synthetic oligonucleotide
  Target: COL7A1; (+) strand; PAM type: YTN; PAM sequence: CTT
gctagatttcagatgactgt

SEQ ID NO: 30699 - DNA, 20 bp, Artificial Sequence
  Description of Artificial Sequence: Synthetic oligonucleotide
  Target: COL7A1; (+) strand; PAM type: YTN; PAM sequence: TTG
ctagatttcagatgactgtg

SEQ ID NO: 30700 - DNA, 20 bp, Artificial Sequence
  Description of Artificial Sequence: Synthetic oligonucleotide
  Target: COL7A1; (+) strand; PAM type: YTN; PAM sequence: CTA
gatttcagatgactgtgact

SEQ ID NO: 30701 - DNA, 20 bp, Artificial Sequence
  Description of Artificial Sequence: Synthetic oligonucleotide
  Target: COL7A1; (+) strand; PAM type: YTN; PAM sequence: TTT
cagatgactgtgactgtatt

SEQ ID NO: 30702 - DNA, 20 bp, Artificial Sequence
  Description of Artificial Sequence: Synthetic oligonucleotide
  Target: COL7A1; (+) strand; PAM type: YTN; PAM sequence: TTC
agatgactgtgactgtattt

SEQ ID NO: 30703 - DNA, 20 bp, Artificial Sequence
  Description of Artificial Sequence: Synthetic oligonucleotide
  Target: COL7A1; (+) strand; PAM type: YTN; PAM sequence: CTG
tgactgtatttctgtgcctg

SEQ ID NO: 30704 - DNA, 20 bp, Artificial Sequence
  Description of Artificial Sequence: Synthetic oligonucleotide
  Target: COL7A1; (+) strand; PAM type: YTN; PAM sequence: CTG
tatttctgtgcctgtagctc

SEQ ID NO: 30705 - DNA, 20 bp, Artificial Sequence
  Description of Artificial Sequence: Synthetic oligonucleotide
  Target: COL7A1; (+) strand; PAM type: YTN; PAM sequence: TTT
ctgtgcctgtagctccatgg

SEQ ID NO: 30706 - DNA, 20 bp, Artificial Sequence
  Description of Artificial Sequence: Synthetic oligonucleotide
  Target: COL7A1; (+) strand; PAM type: YTN; PAM sequence: TTC
tgtgcctgtagctccatggt

SEQ ID NO: 30707 - DNA, 20 bp, Artificial Sequence
  Description of Artificial Sequence: Synthetic oligonucleotide
  Target: COL7A1; (+) strand; PAM type: YTN; PAM sequence: CTG
tgcctgtagctccatggttg

SEQ ID NO: 30708 - DNA, 20 bp, Artificial Sequence
  Description of Artificial Sequence: Synthetic oligonucleotide
  Target: COL7A1; (+) strand; PAM type: YTN; PAM sequence: CTG
tagctccatggttgtgtgtg

SEQ ID NO: 30709 - DNA, 20 bp, Artificial Sequence
  Description of Artificial Sequence: Synthetic oligonucleotide
  Target: COL7A1; (+) strand; PAM type: YTN; PAM sequence: CTC
catggttgtgtgtgtcttgg

SEQ ID NO: 30710 - DNA, 20 bp, Artificial Sequence
  Description of Artificial Sequence: Synthetic oligonucleotide
  Target: COL7A1; (+) strand; PAM type: YTN; PAM sequence: TTG
tgtgtgtcttggagcatggc

SEQ ID NO: 30711 - DNA, 20 bp, Artificial Sequence
  Description of Artificial Sequence: Synthetic oligonucleotide
  Target: COL7A1; (+) strand; PAM type: YTN; PAM sequence: CTT
ggagcatggcctgtggccgt

SEQ ID NO: 30712 - DNA, 20 bp, Artificial Sequence
  Description of Artificial Sequence: Synthetic oligonucleotide
  Target: COL7A1; (+) strand; PAM type: YTN; PAM sequence: TTG
gagcatggcctgtggccgtc

SEQ ID NO: 30713 - DNA, 20 bp, Artificial Sequence
  Description of Artificial Sequence: Synthetic oligonucleotide
  Target: COL7A1; (+) strand; PAM type: YTN; PAM sequence: CTG
tggccgtctgagtgagctgc

SEQ ID NO: 30714 - DNA, 20 bp, Artificial Sequence
  Description of Artificial Sequence: Synthetic oligonucleotide
  Target: COL7A1; (+) strand; PAM type: YTN; PAM sequence: CTG
agtgagctgctacatgtcta

SEQ ID NO: 30715 - DNA, 20 bp, Artificial Sequence
  Description of Artificial Sequence: Synthetic oligonucleotide
  Target: COL7A1; (+) strand; PAM type: YTN; PAM sequence: CTG
ctacatgtctaagggtgtgc

SEQ ID NO: 30716 - DNA, 20 bp, Artificial Sequence
  Description of Artificial Sequence: Synthetic oligonucleotide
  Target: COL7A1; (+) strand; PAM type: YTN; PAM sequence: CTA
catgtctaagggtgtgcctg

SEQ ID NO: 30717 - DNA, 20 bp, Artificial Sequence
  Description of Artificial Sequence: Synthetic oligonucleotide
  Target: COL7A1; (+) strand; PAM type: YTN; PAM sequence: CTA
agggtgtgcctgcataggcc

SEQ ID NO: 30718 - DNA, 20 bp, Artificial Sequence
  Description of Artificial Sequence: Synthetic oligonucleotide
  Target: COL7A1; (+) strand; PAM type: YTN; PAM sequence: CTG
cataggcctgctcaccccaa

SEQ ID NO: 30719 - DNA, 20 bp, Artificial Sequence
  Description of Artificial Sequence: Synthetic oligonucleotide
  Target: COL7A1; (+) strand; PAM type: YTN; PAM sequence: CTG
ctcaccccaacaggcaactg

SEQ ID NO: 30720 - DNA, 20 bp, Artificial Sequence
  Description of Artificial Sequence: Synthetic oligonucleotide
  Target: COL7A1; (+) strand; PAM type: YTN; PAM sequence: CTC
accccaacaggcaactgcac

SEQ ID NO: 30721 - DNA, 20 bp, Artificial Sequence
  Description of Artificial Sequence: Synthetic oligonucleotide
  Target: COL7A1; (+) strand; PAM type: YTN; PAM sequence: CTG
cacacatgtcctttgactct

SEQ ID NO: 30722 - DNA, 20 bp, Artificial Sequence
  Description of Artificial Sequence: Synthetic oligonucleotide
  Target: COL7A1; (+) strand; PAM type: YTN; PAM sequence: CTT
tgactctggctctctagagg

SEQ ID NO: 30723 - DNA, 20 bp, Artificial Sequence
  Description of Artificial Sequence: Synthetic oligonucleotide
  Target: COL7A1; (+) strand; PAM type: YTN; PAM sequence: TTT
gactctggctctctagaggt

SEQ ID NO: 30724 - DNA, 20 bp, Artificial Sequence
  Description of Artificial Sequence: Synthetic oligonucleotide
  Target: COL7A1; (+) strand; PAM type: YTN; PAM sequence: TTG
actctggctctctagaggta

SEQ ID NO: 30725 - DNA, 20 bp, Artificial Sequence
  Description of Artificial Sequence: Synthetic oligonucleotide
  Target: COL7A1; (+) strand; PAM type: YTN; PAM sequence: CTC
tggctctctagaggtagctc

SEQ ID NO: 30726 - DNA, 20 bp, Artificial Sequence
  Description of Artificial Sequence: Synthetic oligonucleotide
  Target: COL7A1; (+) strand; PAM type: YTN; PAM sequence: CTG
gctctctagaggtagctcca

SEQ ID NO: 30727 - DNA, 20 bp, Artificial Sequence
  Description of Artificial Sequence: Synthetic oligonucleotide
  Target: COL7A1; (+) strand; PAM type: YTN; PAM sequence: CTC
tctagaggtagctccacatt

SEQ ID NO: 30728 - DNA, 20 bp, Artificial Sequence
  Description of Artificial Sequence: Synthetic oligonucleotide
  Target: COL7A1; (+) strand; PAM type: YTN; PAM sequence: CTC
tagaggtagctccacattta

SEQ ID NO: 30729 - DNA, 20 bp, Artificial Sequence
  Description of Artificial Sequence: Synthetic oligonucleotide
  Target: COL7A1; (+) strand; PAM type: YTN; PAM sequence: CTA
gaggtagctccacatttatg

SEQ ID NO: 30730 - DNA, 20 bp, Artificial Sequence
  Description of Artificial Sequence: Synthetic oligonucleotide
  Target: COL7A1; (+) strand; PAM type: YTN; PAM sequence: CTC
cacatttatgcatctctggg

SEQ ID NO: 30731 - DNA, 20 bp, Artificial Sequence
  Description of Artificial Sequence: Synthetic oligonucleotide
  Target: COL7A1; (+) strand; PAM type: YTN; PAM sequence: TTT
atgcatctctgggttggtga

SEQ ID NO: 30732 - DNA, 20 bp, Artificial Sequence
  Description of Artificial Sequence: Synthetic oligonucleotide
  Target: COL7A1; (+) strand; PAM type: YTN; PAM sequence: TTA
tgcatctctgggttggtgat

SEQ ID NO: 30733 - DNA, 20 bp, Artificial Sequence
  Description of Artificial Sequence: Synthetic oligonucleotide
  Target: COL7A1; (+) strand; PAM type: YTN; PAM sequence: CTC
tgggttggtgatcgtccaca

SEQ ID NO: 30734 - DNA, 20 bp, Artificial Sequence
  Description of Artificial Sequence: Synthetic oligonucleotide
  Target: COL7A1; (+) strand; PAM type: YTN; PAM sequence: CTG
ggttggtgatcgtccacatg

SEQ ID NO: 30735 - DNA, 20 bp, Artificial Sequence
  Description of Artificial Sequence: Synthetic oligonucleotide
  Target: COL7A1; (+) strand; PAM type: YTN; PAM sequence: TTG
gtgatcgtccacatgtcctg

SEQ ID NO: 30736 - DNA, 20 bp, Artificial Sequence
  Description of Artificial Sequence: Synthetic oligonucleotide
  Target: COL7A1; (+) strand; PAM type: YTN; PAM sequence: CTG
ggtgtgtgcatatccatgtg

SEQ ID NO: 30737 - DNA, 20 bp, Artificial Sequence
  Description of Artificial Sequence: Synthetic oligonucleotide
  Target: COL7A1; (+) strand; PAM type: YTN; PAM sequence: CTT
agtacatgtacccatgggtc

SEQ ID NO: 30738 - DNA, 20 bp, Artificial Sequence
  Description of Artificial Sequence: Synthetic oligonucleotide
  Target: COL7A1; (+) strand; PAM type: YTN; PAM sequence: TTA
gtacatgtacccatgggtct

SEQ ID NO: 30739 - DNA, 20 bp, Artificial Sequence
  Description of Artificial Sequence: Synthetic oligonucleotide
  Target: COL7A1; (+) strand; PAM type: YTN; PAM sequence: CTG
tgtgtcctggtctgtttgca

SEQ ID NO: 30740 - DNA, 20 bp, Artificial Sequence
  Description of Artificial Sequence: Synthetic oligonucleotide
  Target: COL7A1; (+) strand; PAM type: YTN; PAM sequence: CTG
gtctgtttgcacatcttggc

SEQ ID NO: 30741 - DNA, 20 bp, Artificial Sequence
  Description of Artificial Sequence: Synthetic oligonucleotide
  Target: COL7A1; (+) strand; PAM type: YTN; PAM sequence: CTG
tttgcacatcttggcccatg

SEQ ID NO: 30742 - DNA, 20 bp, Artificial Sequence
  Description of Artificial Sequence: Synthetic oligonucleotide
  Target: COL7A1; (+) strand; PAM type: YTN; PAM sequence: TTT
gcacatcttggcccatgtct

SEQ ID NO: 30743 - DNA, 20 bp, Artificial Sequence
  Description of Artificial Sequence: Synthetic oligonucleotide
  Target: COL7A1; (+) strand; PAM type: YTN; PAM sequence: TTG
cacatcttggcccatgtctg

SEQ ID NO: 30744 - DNA, 20 bp, Artificial Sequence
  Description of Artificial Sequence: Synthetic oligonucleotide
  Target: COL7A1; (+) strand; PAM type: YTN; PAM sequence: CTT
ggcccatgtctgcatatggg

SEQ ID NO: 30745 - DNA, 20 bp, Artificial Sequence
  Description of Artificial Sequence: Synthetic oligonucleotide
  Target: COL7A1; (+) strand; PAM type: YTN; PAM sequence: TTG
gcccatgtctgcatatgggc

SEQ ID NO: 30746 - DNA, 20 bp, Artificial Sequence
  Description of Artificial Sequence: Synthetic oligonucleotide
  Target: COL7A1; (+) strand; PAM type: YTN; PAM sequence: CTG
catatgggcatgggcttata

SEQ ID NO: 30747 - DNA, 20 bp, Artificial Sequence
  Description of Artificial Sequence: Synthetic oligonucleotide
  Target: COL7A1; (+) strand; PAM type: YTN; PAM sequence: CTT
atacatgtctccaaagagca

SEQ ID NO: 30748 - DNA, 20 bp, Artificial Sequence
  Description of Artificial Sequence: Synthetic oligonucleotide
  Target: COL7A1; (+) strand; PAM type: YTN; PAM sequence: TTA
tacatgtctccaaagagcat

SEQ ID NO: 30749 - DNA, 20 bp, Artificial Sequence
  Description of Artificial Sequence: Synthetic oligonucleotide
  Target: COL7A1; (+) strand; PAM type: YTN; PAM sequence: CTC
caaagagcatgggcttatac

SEQ ID NO: 30750 - DNA, 20 bp, Artificial Sequence
  Description of Artificial Sequence: Synthetic oligonucleotide
  Target: COL7A1; (+) strand; PAM type: YTN; PAM sequence: CTT
atacatgccttgagagccat

SEQ ID NO: 30751 - DNA, 20 bp, Artificial Sequence
  Description of Artificial Sequence: Synthetic oligonucleotide
  Target: COL7A1; (+) strand; PAM type: YTN; PAM sequence: TTA
tacatgccttgagagccatg

SEQ ID NO: 30752 - DNA, 20 bp, Artificial Sequence
  Description of Artificial Sequence: Synthetic oligonucleotide
  Target: COL7A1; (+) strand; PAM type: YTN; PAM sequence: CTT
gagagccatgtgtcttggca

SEQ ID NO: 30753 - DNA, 20 bp, Artificial Sequence
  Description of Artificial Sequence: Synthetic oligonucleotide
  Target: COL7A1; (+) strand; PAM type: YTN; PAM sequence: TTG
agagccatgtgtcttggcat

SEQ ID NO: 30754 - DNA, 20 bp, Artificial Sequence
  Description of Artificial Sequence: Synthetic oligonucleotide
  Target: COL7A1; (+) strand; PAM type: YTN; PAM sequence: CTT
ggcatctgtctgcaactctt

SEQ ID NO: 30755 - DNA, 20 bp, Artificial Sequence
  Description of Artificial Sequence: Synthetic oligonucleotide
  Target: COL7A1; (+) strand; PAM type: YTN; PAM sequence: TTG
gcatctgtctgcaactcttg

SEQ ID NO: 30756 - DNA, 20 bp, Artificial Sequence
  Description of Artificial Sequence: Synthetic oligonucleotide
  Target: COL7A1; (+) strand; PAM type: YTN; PAM sequence: CTG
tctgcaactcttgtgtgtag

SEQ ID NO: 30757 - DNA, 20 bp, Artificial Sequence
  Description of Artificial Sequence: Synthetic oligonucleotide
  Target: COL7A1; (+) strand; PAM type: YTN; PAM sequence: CTG
caactcttgtgtgtagctca

SEQ ID NO: 30758 - DNA, 20 bp, Artificial Sequence
  Description of Artificial Sequence: Synthetic oligonucleotide
  Target: COL7A1; (+) strand; PAM type: YTN; PAM sequence: CTC
ttgtgtgtagctcaatgtgt

SEQ ID NO: 30759 - DNA, 20 bp, Artificial Sequence
  Description of Artificial Sequence: Synthetic oligonucleotide
  Target: COL7A1; (+) strand; PAM type: YTN; PAM sequence: CTT
gtgtgtagctcaatgtgtat

SEQ ID NO: 30760 - DNA, 20 bp, Artificial Sequence
  Description of Artificial Sequence: Synthetic oligonucleotide
  Target: COL7A1; (+) strand; PAM type: YTN; PAM sequence: TTG
tgtgtagctcaatgtgtatg

SEQ ID NO: 30761 - DNA, 20 bp, Artificial Sequence
  Description of Artificial Sequence: Synthetic oligonucleotide
  Target: COL7A1; (+) strand; PAM type: YTN; PAM sequence: CTC
aatgtgtatgaccataagcg

SEQ ID NO: 30762 - DNA, 20 bp, Artificial Sequence
  Description of Artificial Sequence: Synthetic oligonucleotide
  Target: COL7A1; (+) strand; PAM type: YTN; PAM sequence: CTA
gcacatgtcacaggtcagag

SEQ ID NO: 30763 - DNA, 20 bp, Artificial Sequence
  Description of Artificial Sequence: Synthetic oligonucleotide
  Target: COL7A1; (+) strand; PAM type: YTN; PAM sequence: CTC
accatgtctcaacacaggtc

SEQ ID NO: 30764 - DNA, 20 bp, Artificial Sequence
  Description of Artificial Sequence: Synthetic oligonucleotide
  Target: COL7A1; (+) strand; PAM type: YTN; PAM sequence: CTC
aacacaggtccacatgcggt

SEQ ID NO: 30765 - DNA, 20 bp, Artificial Sequence
  Description of Artificial Sequence: Synthetic oligonucleotide
  Target: COL7A1; (+) strand; PAM type: YTN; PAM sequence: CTT
gggtccatgtcttagcacat

SEQ ID NO: 30766 - DNA, 20 bp, Artificial Sequence
  Description of Artificial Sequence: Synthetic oligonucleotide
  Target: COL7A1; (+) strand; PAM type: YTN; PAM sequence: TTG
ggtccatgtcttagcacatg

SEQ ID NO: 30767 - DNA, 20 bp, Artificial Sequence
  Description of Artificial Sequence: Synthetic oligonucleotide
  Target: COL7A1; (+) strand; PAM type: YTN; PAM sequence: CTT
agcacatgagtctgggtgga

SEQ ID NO: 30768 - DNA, 20 bp, Artificial Sequence
  Description of Artificial Sequence: Synthetic oligonucleotide
  Target: COL7A1; (+) strand; PAM type: YTN; PAM sequence: TTA
gcacatgagtctgggtggaa

SEQ ID NO: 30769 - DNA, 20 bp, Artificial Sequence
  Description of Artificial Sequence: Synthetic oligonucleotide
  Target: COL7A1; (+) strand; PAM type: YTN; PAM sequence: CTG
ggtggaagtgtctgggtatc

SEQ ID NO: 30770 - DNA, 20 bp, Artificial Sequence
  Description of Artificial Sequence: Synthetic oligonucleotide
  Target: COL7A1; (+) strand; PAM type: YTN; PAM sequence: CTG
ggtatcaacatgtctctaag

SEQ ID NO: 30771 - DNA, 20 bp, Artificial Sequence
  Description of Artificial Sequence: Synthetic oligonucleotide
  Target: COL7A1; (+) strand; PAM type: YTN; PAM sequence: CTC
taagtgccccaaatgtggct

SEQ ID NO: 30772 - DNA, 20 bp, Artificial Sequence
  Description of Artificial Sequence: Synthetic oligonucleotide
  Target: COL7A1; (+) strand; PAM type: YTN; PAM sequence: CTA
agtgccccaaatgtggctac

SEQ ID NO: 30773 - DNA, 20 bp, Artificial Sequence
  Description of Artificial Sequence: Synthetic oligonucleotide
  Target: COL7A1; (+) strand; PAM type: YTN; PAM sequence: CTA
cacaccagtgtgtttgtgcc

SEQ ID NO: 30774 - DNA, 20 bp, Artificial Sequence
  Description of Artificial Sequence: Synthetic oligonucleotide
  Target: COL7A1; (+) strand; PAM type: YTN; PAM sequence: TTT
gtgcctgtcgacctgtctgt

SEQ ID NO: 30775 - DNA, 20 bp, Artificial Sequence
  Description of Artificial Sequence: Synthetic oligonucleotide
  Target: COL7A1; (+) strand; PAM type: YTN; PAM sequence: TTG
tgcctgtcgacctgtctgtg

SEQ ID NO: 30776 - DNA, 20 bp, Artificial Sequence
  Description of Artificial Sequence: Synthetic oligonucleotide
  Target: COL7A1; (+) strand; PAM type: YTN; PAM sequence: CTG
tcgacctgtctgtggctctt

SEQ ID NO: 30777 - DNA, 20 bp, Artificial Sequence
  Description of Artificial Sequence: Synthetic oligonucleotide
  Target: COL7A1; (+) strand; PAM type: YTN; PAM sequence: CTG
tctgtggctcttcacctgtg

SEQ ID NO: 30778 - DNA, 20 bp, Artificial Sequence
  Description of Artificial Sequence: Synthetic oligonucleotide
  Target: COL7A1; (+) strand; PAM type: YTN; PAM sequence: CTG
tggctcttcacctgtgccta

SEQ ID NO: 30779 - DNA, 20 bp, Artificial Sequence
  Description of Artificial Sequence: Synthetic oligonucleotide
  Target: COL7A1; (+) strand; PAM type: YTN; PAM sequence: CTC
ttcacctgtgcctatggctg

SEQ ID NO: 30780 - DNA, 20 bp, Artificial Sequence
  Description of Artificial Sequence: Synthetic oligonucleotide
  Target: COL7A1; (+) strand; PAM type: YTN; PAM sequence: CTT
cacctgtgcctatggctgtg

SEQ ID NO: 30781 - DNA, 20 bp, Artificial Sequence
  Description of Artificial Sequence: Synthetic oligonucleotide
  Target: COL7A1; (+) strand; PAM type: YTN; PAM sequence: TTC
acctgtgcctatggctgtgg

SEQ ID NO: 30782 - DNA, 20 bp, Artificial Sequence
  Description of Artificial Sequence: Synthetic oligonucleotide
  Target: COL7A1; (+) strand; PAM type: YTN; PAM sequence: CTG
tgcctatggctgtgggttat

SEQ ID NO: 30783 - DNA, 20 bp, Artificial Sequence
  Description of Artificial Sequence: Synthetic oligonucleotide
  Target: COL7A1; (+) strand; PAM type: YTN; PAM sequence: CTA
tggctgtgggttatctgggc

SEQ ID NO: 30784 - DNA, 20 bp, Artificial Sequence
  Description of Artificial Sequence: Synthetic oligonucleotide
  Target: COL7A1; (+) strand; PAM type: YTN; PAM sequence: CTG
tgggttatctgggcatgtgt

SEQ ID NO: 30785 - DNA, 20 bp, Artificial Sequence
  Description of Artificial Sequence: Synthetic oligonucleotide
  Target: COL7A1; (+) strand; PAM type: YTN; PAM sequence: TTA
tctgggcatgtgtcagccca

SEQ ID NO: 30786 - DNA, 20 bp, Artificial Sequence
  Description of Artificial Sequence: Synthetic oligonucleotide
  Target: COL7A1; (+) strand; PAM type: YTN; PAM sequence: CTG
ggcatgtgtcagcccatcct

SEQ ID NO: 30787 - DNA, 20 bp, Artificial Sequence
  Description of Artificial Sequence: Synthetic oligonucleotide
  Target: COL7A1; (+) strand; PAM type: YTN; PAM sequence: CTG
gcataaattggcccattcac

SEQ ID NO: 30788 - DNA, 20 bp, Artificial Sequence
  Description of Artificial Sequence: Synthetic oligonucleotide
  Target: COL7A1; (+) strand; PAM type: YTN; PAM sequence: TTG
gcccattcacctaactccct

SEQ ID NO: 30789 - DNA, 20 bp, Artificial Sequence
  Description of Artificial Sequence: Synthetic oligonucleotide
  Target: COL7A1; (+) strand; PAM type: YTN; PAM sequence: TTC
acctaactccctatgtgtct

SEQ ID NO: 30790 - DNA, 20 bp, Artificial Sequence
  Description of Artificial Sequence: Synthetic oligonucleotide
  Target: COL7A1; (+) strand; PAM type: YTN; PAM sequence: CTA
actccctatgtgtctgtgag

SEQ ID NO: 30791 - DNA, 20 bp, Artificial Sequence
  Description of Artificial Sequence: Synthetic oligonucleotide
  Target: COL7A1; (+) strand; PAM type: YTN; PAM sequence: CTC
cctatgtgtctgtgaggctg

SEQ ID NO: 30792 - DNA, 20 bp, Artificial Sequence
  Description of Artificial Sequence: Synthetic oligonucleotide
  Target: COL7A1; (+) strand; PAM type: YTN; PAM sequence: CTA
tgtgtctgtgaggctgcctg

SEQ ID NO: 30793 - DNA, 20 bp, Artificial Sequence
  Description of Artificial Sequence: Synthetic oligonucleotide
  Target: COL7A1; (+) strand; PAM type: YTN; PAM sequence: CTG
tgaggctgcctgtgtgtgca

SEQ ID NO: 30794 - DNA, 20 bp, Artificial Sequence
  Description of Artificial Sequence: Synthetic oligonucleotide
  Target: COL7A1; (+) strand; PAM type: YTN; PAM sequence: CTG
cctgtgtgtgcatatagaac

SEQ ID NO: 30795 - DNA, 20 bp, Artificial Sequence
  Description of Artificial Sequence: Synthetic oligonucleotide
  Target: COL7A1; (+) strand; PAM type: YTN; PAM sequence: CTG
tgtgtgcatatagaactatg

SEQ ID NO: 30796 - DNA, 20 bp, Artificial Sequence
  Description of Artificial Sequence: Synthetic oligonucleotide
  Target: COL7A1; (+) strand; PAM type: YTN; PAM sequence: CTA
tgtttccaggcctggcgcaa

SEQ ID NO: 30797 - DNA, 20 bp, Artificial Sequence
  Description of Artificial Sequence: Synthetic oligonucleotide
  Target: COL7A1; (+) strand; PAM type: YTN; PAM sequence: TTT
ccaggcctggcgcaatggct

SEQ ID NO: 30798 - DNA, 20 bp, Artificial Sequence
  Description of Artificial Sequence: Synthetic oligonucleotide
  Target: COL7A1; (+) strand; PAM type: YTN; PAM sequence: TTC
caggcctggcgcaatggctc

SEQ ID NO: 30799 - DNA, 20 bp, Artificial Sequence
  Description of Artificial Sequence: Synthetic oligonucleotide
  Target: COL7A1; (+) strand; PAM type: YTN; PAM sequence: CTG
gcgcaatggctcacgcctgt

SEQ ID NO: 30800 - DNA, 20 bp, Artificial Sequence
  Description of Artificial Sequence: Synthetic oligonucleotide
  Target: COL7A1; (+) strand; PAM type: YTN; PAM sequence: CTC
acgcctgtaatcccagcact

SEQ ID NO: 30801 - DNA, 20 bp, Artificial Sequence
  Description of Artificial Sequence: Synthetic oligonucleotide
  Target: COL7A1; (+) strand; PAM type: YTN; PAM sequence: CTG
taatcccagcactttaggag

SEQ ID NO: 30802 - DNA, 20 bp, Artificial Sequence
  Description of Artificial Sequence: Synthetic oligonucleotide
  Target: COL7A1; (+) strand; PAM type: YTN; PAM sequence: CTT
taggaggccgaggcgggcgg

SEQ ID NO: 30803 - DNA, 20 bp, Artificial Sequence
  Description of Artificial Sequence: Synthetic oligonucleotide
  Target: COL7A1; (+) strand; PAM type: YTN; PAM sequence: TTT
aggaggccgaggcgggcgga

SEQ ID NO: 30804 - DNA, 20 bp, Artificial Sequence
  Description of Artificial Sequence: Synthetic oligonucleotide
  Target: COL7A1; (+) strand; PAM type: YTN; PAM sequence: TTA
ggaggccgaggcgggcggat

SEQ ID NO: 30805 - DNA, 20 bp, Artificial Sequence
  Description of Artificial Sequence: Synthetic oligonucleotide
  Target: COL7A1; (+) strand; PAM type: YTN; PAM sequence: CTG
aggtcagtttgtgatcagcc

SEQ ID NO: 30806 - DNA, 20 bp, Artificial Sequence
  Description of Artificial Sequence: Synthetic oligonucleotide
  Target: COL7A1; (+) strand; PAM type: YTN; PAM sequence: TTT
gtgatcagcctgactaacat

SEQ ID NO: 30807 - DNA, 20 bp, Artificial Sequence
  Description of Artificial Sequence: Synthetic oligonucleotide
  Target: COL7A1; (+) strand; PAM type: YTN; PAM sequence: TTG
tgatcagcctgactaacatg

SEQ ID NO: 30808 - DNA, 20 bp, Artificial Sequence
  Description of Artificial Sequence: Synthetic oligonucleotide
  Target: COL7A1; (+) strand; PAM type: YTN; PAM sequence: CTG
actaacatggagaaacccca

SEQ ID NO: 30809 - DNA, 20 bp, Artificial Sequence
  Description of Artificial Sequence: Synthetic oligonucleotide
  Target: COL7A1; (+) strand; PAM type: YTN; PAM sequence: CTA
acatggagaaaccccatctc

SEQ ID NO: 30810 - DNA, 20 bp, Artificial Sequence
  Description of Artificial Sequence: Synthetic oligonucleotide
  Target: COL7A1; (+) strand; PAM type: YTN; PAM sequence: CTC
tactaaaaatacaaaattag

SEQ ID NO: 30811 - DNA, 20 bp, Artificial Sequence
  Description of Artificial Sequence: Synthetic oligonucleotide
  Target: COL7A1; (+) strand; PAM type: YTN; PAM sequence: CTA
ctaaaaatacaaaattagcc

SEQ ID NO: 30812 - DNA, 20 bp, Artificial Sequence
  Description of Artificial Sequence: Synthetic oligonucleotide
  Target: COL7A1; (+) strand; PAM type: YTN; PAM sequence: CTA
aaaatacaaaattagccagg

SEQ ID NO: 30813 - DNA, 20 bp, Artificial Sequence
  Description of Artificial Sequence: Synthetic oligonucleotide
  Target: COL7A1; (+) strand; PAM type: YTN; PAM sequence: TTA
gccaggcatggtggcgcatg

SEQ ID NO: 30814 - DNA, 20 bp, Artificial Sequence
  Description of Artificial Sequence: Synthetic oligonucleotide
  Target: COL7A1; (+) strand; PAM type: YTN; PAM sequence: CTG
taatcccagttactcgggag

SEQ ID NO: 30815 - DNA, 20 bp, Artificial Sequence
  Description of Artificial Sequence: Synthetic oligonucleotide
  Target: COL7A1; (+) strand; PAM type: YTN; PAM sequence: TTA
ctcgggaggttgaggcagga

SEQ ID NO: 30816 - DNA, 20 bp, Artificial Sequence
  Description of Artificial Sequence: Synthetic oligonucleotide
  Target: COL7A1; (+) strand; PAM type: YTN; PAM sequence: CTC
gggaggttgaggcaggagaa

SEQ ID NO: 30817 - DNA, 20 bp, Artificial Sequence
  Description of Artificial Sequence: Synthetic oligonucleotide
  Target: COL7A1; (+) strand; PAM type: YTN; PAM sequence: TTG
aggcaggagaatcacttgaa

SEQ ID NO: 30818 - DNA, 20 bp, Artificial Sequence
  Description of Artificial Sequence: Synthetic oligonucleotide
  Target: COL7A1; (+) strand; PAM type: YTN; PAM sequence: CTT
gaacccgagagtcgaaggtt

SEQ ID NO: 30819 - DNA, 20 bp, Artificial Sequence
  Description of Artificial Sequence: Synthetic oligonucleotide
  Target: COL7A1; (+) strand; PAM type: YTN; PAM sequence: TTG
aacccgagagtcgaaggttg

SEQ ID NO: 30820 - DNA, 20 bp, Artificial Sequence
  Description of Artificial Sequence: Synthetic oligonucleotide
  Target: COL7A1; (+) strand; PAM type: YTN; PAM sequence: TTG
cagtgagctgagattgtgcc

SEQ ID NO: 30821 - DNA, 20 bp, Artificial Sequence
  Description of Artificial Sequence: Synthetic oligonucleotide
  Target: COL7A1; (+) strand; PAM type: YTN; PAM sequence: CTG
agattgtgccactgcactcc

SEQ ID NO: 30822 - DNA, 20 bp, Artificial Sequence
  Description of Artificial Sequence: Synthetic oligonucleotide
  Target: COL7A1; (+) strand; PAM type: YTN; PAM sequence: TTG
tgccactgcactccaacctg

SEQ ID NO: 30823 - DNA, 20 bp, Artificial Sequence
  Description of Artificial Sequence: Synthetic oligonucleotide
  Target: COL7A1; (+) strand; PAM type: YTN; PAM sequence: CTG
cactccaacctgggcaacaa

SEQ ID NO: 30824 - DNA, 20 bp, Artificial Sequence
  Description of Artificial Sequence: Synthetic oligonucleotide
  Target: COL7A1; (+) strand; PAM type: YTN; PAM sequence: CTC
caacctgggcaacaagagcg

SEQ ID NO: 30825 - DNA, 20 bp, Artificial Sequence
  Description of Artificial Sequence: Synthetic oligonucleotide
  Target: COL7A1; (+) strand; PAM type: YTN; PAM sequence: CTG
ggcaacaagagcgaaactcc

SEQ ID NO: 30826 - DNA, 20 bp, Artificial Sequence
  Description of Artificial Sequence: Synthetic oligonucleotide
  Target: COL7A1; (+) strand; PAM type: YTN; PAM sequence: CTC
catctcaaaaaaaaaaaaac

SEQ ID NO: 30827 - DNA, 20 bp, Artificial Sequence
  Description of Artificial Sequence: Synthetic oligonucleotide
  Target: COL7A1; (+) strand; PAM type: YTN; PAM sequence: CTC
aaaaaaaaaaaaactatgtt

SEQ ID NO: 30828 - DNA, 20 bp, Artificial Sequence
  Description of Artificial Sequence: Synthetic oligonucleotide
  Target: COL7A1; (+) strand; PAM type: YTN; PAM sequence: CTA
tgtttctggatgcatctgta

SEQ ID NO: 30829 - DNA, 20 bp, Artificial Sequence
  Description of Artificial Sequence: Synthetic oligonucleotide
  Target: COL7A1; (+) strand; PAM type: YTN; PAM sequence: TTT
ctggatgcatctgtatgtct

SEQ ID NO: 30830 - DNA, 20 bp, Artificial Sequence
  Description of Artificial Sequence: Synthetic oligonucleotide
  Target: COL7A1; (+) strand; PAM type: YTN; PAM sequence: TTC
tggatgcatctgtatgtctg

SEQ ID NO: 30831 - DNA, 20 bp, Artificial Sequence
  Description of Artificial Sequence: Synthetic oligonucleotide
  Target: COL7A1; (+) strand; PAM type: YTN; PAM sequence: CTG
gatgcatctgtatgtctggg

SEQ ID NO: 30832 - DNA, 20 bp, Artificial Sequence
  Description of Artificial Sequence: Synthetic oligonucleotide
  Target: COL7A1; (+) strand; PAM type: YTN; PAM sequence: CTG
tatgtctgggccaggatgca

SEQ ID NO: 30833 - DNA, 20 bp, Artificial Sequence
  Description of Artificial Sequence: Synthetic oligonucleotide
  Target: COL7A1; (+) strand; PAM type: YTN; PAM sequence: CTG
ggccaggatgcatgtgtcta

SEQ ID NO: 30834 - DNA, 20 bp, Artificial Sequence
  Description of Artificial Sequence: Synthetic oligonucleotide
  Target: COL7A1; (+) strand; PAM type: YTN; PAM sequence: CTA
cacgtgtgcctcatgtgttg

SEQ ID NO: 30835 - DNA, 20 bp, Artificial Sequence
  Description of Artificial Sequence: Synthetic oligonucleotide
  Target: COL7A1; (+) strand; PAM type: YTN; PAM sequence: CTC
atgtgttgctacagatcttg

SEQ ID NO: 30836 - DNA, 20 bp, Artificial Sequence
  Description of Artificial Sequence: Synthetic oligonucleotide
  Target: COL7A1; (+) strand; PAM type: YTN; PAM sequence: TTG
ctacagatcttggctgtgta

SEQ ID NO: 30837 - DNA, 20 bp, Artificial Sequence
  Description of Artificial Sequence: Synthetic oligonucleotide
  Target: COL7A1; (+) strand; PAM type: YTN; PAM sequence: CTA
cagatcttggctgtgtaggt

SEQ ID NO: 30838 - DNA, 20 bp, Artificial Sequence
  Description of Artificial Sequence: Synthetic oligonucleotide
  Target: COL7A1; (+) strand; PAM type: YTN; PAM sequence: CTT
ggctgtgtaggtgtgctggc

SEQ ID NO: 30839 - DNA, 20 bp, Artificial Sequence
  Description of Artificial Sequence: Synthetic oligonucleotide
  Target: COL7A1; (+) strand; PAM type: YTN; PAM sequence: TTG
gctgtgtaggtgtgctggcg

SEQ ID NO: 30840 - DNA, 20 bp, Artificial Sequence
  Description of Artificial Sequence: Synthetic oligonucleotide
  Target: COL7A1; (+) strand; PAM type: YTN; PAM sequence: CTG
tgtaggtgtgctggcgtttc

SEQ ID NO: 30841 - DNA, 20 bp, Artificial Sequence
  Description of Artificial Sequence: Synthetic oligonucleotide
  Target: COL7A1; (+) strand; PAM type: YTN; PAM sequence: CTG
gcgtttcttggcaggtttcg

SEQ ID NO: 30842 - DNA, 20 bp, Artificial Sequence
  Description of Artificial Sequence: Synthetic oligonucleotide
  Target: COL7A1; (+) strand; PAM type: YTN; PAM sequence: TTT
cttggcaggtttcgccgcag

SEQ ID NO: 30843 - DNA, 20 bp, Artificial Sequence
  Description of Artificial Sequence: Synthetic oligonucleotide
  Target: COL7A1; (+) strand; PAM type: YTN; PAM sequence: TTC
ttggcaggtttcgccgcagc

SEQ ID NO: 30844 - DNA, 20 bp, Artificial Sequence
  Description of Artificial Sequence: Synthetic oligonucleotide
  Target: COL7A1; (+) strand; PAM type: YTN; PAM sequence: CTT
ggcaggtttcgccgcagctg

SEQ ID NO: 30845 - DNA, 20 bp, Artificial Sequence
  Description of Artificial Sequence: Synthetic oligonucleotide
  Target: COL7A1; (+) strand; PAM type: YTN; PAM sequence: TTG
gcaggtttcgccgcagctgc

SEQ ID NO: 30846 - DNA, 20 bp, Artificial Sequence
  Description of Artificial Sequence: Synthetic oligonucleotide
  Target: COL7A1; (+) strand; PAM type: YTN; PAM sequence: TTT
cgccgcagctgccctggaca

SEQ ID NO: 30847 - DNA, 20 bp, Artificial Sequence
  Description of Artificial Sequence: Synthetic oligonucleotide
  Target: COL7A1; (+) strand; PAM type: YTN; PAM sequence: TTC
gccgcagctgccctggacac

SEQ ID NO: 30848 - DNA, 20 bp, Artificial Sequence
  Description of Artificial Sequence: Synthetic oligonucleotide
  Target: COL7A1; (+) strand; PAM type: YTN; PAM sequence: CTG
ccctggacacactcacgttt

SEQ ID NO: 30849 - DNA, 20 bp, Artificial Sequence
  Description of Artificial Sequence: Synthetic oligonucleotide
  Target: COL7A1; (+) strand; PAM type: YTN; PAM sequence: CTG
gacacactcacgttttttcc

SEQ ID NO: 30850 - DNA, 20 bp, Artificial Sequence
  Description of Artificial Sequence: Synthetic oligonucleotide
  Target: COL7A1; (+) strand; PAM type: YTN; PAM sequence: CTC
acgttttttccattcaggcc

SEQ ID NO: 30851 - DNA, 20 bp, Artificial Sequence
  Description of Artificial Sequence: Synthetic oligonucleotide
  Target: COL7A1; (+) strand; PAM type: YTN; PAM sequence: TTT
tttccattcaggccaggttt

SEQ ID NO: 30852 - DNA, 20 bp, Artificial Sequence
  Description of Artificial Sequence: Synthetic oligonucleotide
  Target: COL7A1; (+) strand; PAM type: YTN; PAM sequence: TTT
ttccattcaggccaggtttg

SEQ ID NO: 30853 - DNA, 20 bp, Artificial Sequence
  Description of Artificial Sequence: Synthetic oligonucleotide
  Target: COL7A1; (+) strand; PAM type: YTN; PAM sequence: TTT
tccattcaggccaggtttgc

SEQ ID NO: 30854 - DNA, 20 bp, Artificial Sequence
  Description of Artificial Sequence: Synthetic oligonucleotide
  Target: COL7A1; (+) strand; PAM type: YTN; PAM sequence: TTT
ccattcaggccaggtttgcc

SEQ ID NO: 30855 - DNA, 20 bp, Artificial Sequence
  Description of Artificial Sequence: Synthetic oligonucleotide
  Target: COL7A1; (+) strand; PAM type: YTN; PAM sequence: TTC
cattcaggccaggtttgcca

SEQ ID NO: 30856 - DNA, 20 bp, Artificial Sequence
  Description of Artificial Sequence: Synthetic oligonucleotide
  Target: COL7A1; (+) strand; PAM type: YTN; PAM sequence: TTC
aggccaggtttgccatcctc

SEQ ID NO: 30857 - DNA, 20 bp, Artificial Sequence
  Description of Artificial Sequence: Synthetic oligonucleotide
  Target: COL7A1; (+) strand; PAM type: YTN; PAM sequence: TTT
gccatcctcgcctggctttc

SEQ ID NO: 30858 - DNA, 20 bp, Artificial Sequence
  Description of Artificial Sequence: Synthetic oligonucleotide
  Target: COL7A1; (+) strand; PAM type: YTN; PAM sequence: TTG
ccatcctcgcctggctttcc

SEQ ID NO: 30859 - DNA, 20 bp, Artificial Sequence
  Description of Artificial Sequence: Synthetic oligonucleotide
  Target: COL7A1; (+) strand; PAM type: YTN; PAM sequence: CTC
gcctggctttccctgtggga

SEQ ID NO: 30860 - DNA, 20 bp, Artificial Sequence
  Description of Artificial Sequence: Synthetic oligonucleotide
  Target: COL7A1; (+) strand; PAM type: YTN; PAM sequence: CTG
gctttccctgtgggaacaga

SEQ ID NO: 30861 - DNA, 20 bp, Artificial Sequence
  Description of Artificial Sequence: Synthetic oligonucleotide
  Target: COL7A1; (+) strand; PAM type: YTN; PAM sequence: CTT
tccctgtgggaacagatcac

SEQ ID NO: 30862 - DNA, 20 bp, Artificial Sequence
  Description of Artificial Sequence: Synthetic oligonucleotide
  Target: COL7A1; (+) strand; PAM type: YTN; PAM sequence: TTT
ccctgtgggaacagatcact

SEQ ID NO: 30863 - DNA, 20 bp, Artificial Sequence
  Description of Artificial Sequence: Synthetic oligonucleotide
  Target: COL7A1; (+) strand; PAM type: YTN; PAM sequence: TTC
cctgtgggaacagatcactg

SEQ ID NO: 30864 - DNA, 20 bp, Artificial Sequence
  Description of Artificial Sequence: Synthetic oligonucleotide
  Target: COL7A1; (+) strand; PAM type: YTN; PAM sequence: CTG
tgggaacagatcactggttg

SEQ ID NO: 30865 - DNA, 20 bp, Artificial Sequence
  Description of Artificial Sequence: Synthetic oligonucleotide
  Target: COL7A1; (+) strand; PAM type: YTN; PAM sequence: CTG
gttggatgtcggggatcggg

SEQ ID NO: 30866 - DNA, 20 bp, Artificial Sequence
  Description of Artificial Sequence: Synthetic oligonucleotide
  Target: COL7A1; (+) strand; PAM type: YTN; PAM sequence: TTG
gatgtcggggatcgggtgag

SEQ ID NO: 30867 - DNA, 20 bp, Artificial Sequence
  Description of Artificial Sequence: Synthetic oligonucleotide
  Target: COL7A1; (+) strand; PAM type: YTN; PAM sequence: CTG
gtctcaccggtaatccaggg

SEQ ID NO: 30868 - DNA, 20 bp, Artificial Sequence
  Description of Artificial Sequence: Synthetic oligonucleotide
  Target: COL7A1; (+) strand; PAM type: YTN; PAM sequence: CTC
accggtaatccagggggacc

SEQ ID NO: 30869 - DNA, 20 bp, Artificial Sequence
  Description of Artificial Sequence: Synthetic oligonucleotide
  Target: COL7A1; (+) strand; PAM type: YTN; PAM sequence: CTG
ttctccacggaggcctggaa

SEQ ID NO: 30870 - DNA, 20 bp, Artificial Sequence
  Description of Artificial Sequence: Synthetic oligonucleotide
  Target: COL7A1; (+) strand; PAM type: YTN; PAM sequence: TTC
tccacggaggcctggaagcc

SEQ ID NO: 30871 - DNA, 20 bp, Artificial Sequence
  Description of Artificial Sequence: Synthetic oligonucleotide
  Target: COL7A1; (+) strand; PAM type: YTN; PAM sequence: CTC
cacggaggcctggaagcccc

SEQ ID NO: 30872 - DNA, 20 bp, Artificial Sequence
  Description of Artificial Sequence: Synthetic oligonucleotide
  Target: COL7A1; (+) strand; PAM type: YTN; PAM sequence: CTG
gaagcccctggaaaaagtct

SEQ ID NO: 30873 - DNA, 20 bp, Artificial Sequence
  Description of Artificial Sequence: Synthetic oligonucleotide
  Target: COL7A1; (+) strand; PAM type: YTN; PAM sequence: CTG
gaaaaagtctttgttaagat

SEQ ID NO: 30874 - DNA, 20 bp, Artificial Sequence
  Description of Artificial Sequence: Synthetic oligonucleotide
  Target: COL7A1; (+) strand; PAM type: YTN; PAM sequence: CTT
tgttaagatttatagggcct

SEQ ID NO: 30875 - DNA, 20 bp, Artificial Sequence
  Description of Artificial Sequence: Synthetic oligonucleotide
  Target: COL7A1; (+) strand; PAM type: YTN; PAM sequence: TTT
gttaagatttatagggcctc

SEQ ID NO: 30876 - DNA, 20 bp, Artificial Sequence
  Description of Artificial Sequence: Synthetic oligonucleotide
  Target: COL7A1; (+) strand; PAM type: YTN; PAM sequence: TTG
ttaagatttatagggcctct

SEQ ID NO: 30877 - DNA, 20 bp, Artificial Sequence
  Description of Artificial Sequence: Synthetic oligonucleotide
  Target: COL7A1; (+) strand; PAM type: YTN; PAM sequence: TTA
agatttatagggcctctgag

SEQ ID NO: 30878 - DNA, 20 bp, Artificial Sequence
  Description of Artificial Sequence: Synthetic oligonucleotide
  Target: COL7A1; (+) strand; PAM type: YTN; PAM sequence: TTT
atagggcctctgagatatcc

SEQ ID NO: 30879 - DNA, 20 bp, Artificial Sequence
  Description of Artificial Sequence: Synthetic oligonucleotide
  Target: COL7A1; (+) strand; PAM type: YTN; PAM sequence: TTA
tagggcctctgagatatccc

SEQ ID NO: 30880 - DNA, 20 bp, Artificial Sequence
  Description of Artificial Sequence: Synthetic oligonucleotide
  Target: COL7A1; (+) strand; PAM type: YTN; PAM sequence: CTC
tgagatatcccttggggcac

SEQ ID NO: 30881 - DNA, 20 bp, Artificial Sequence
  Description of Artificial Sequence: Synthetic oligonucleotide
  Target: COL7A1; (+) strand; PAM type: YTN; PAM sequence: CTG
agatatcccttggggcacac

SEQ ID NO: 30882 - DNA, 20 bp, Artificial Sequence
  Description of Artificial Sequence: Synthetic oligonucleotide
  Target: COL7A1; (+) strand; PAM type: YTN; PAM sequence: CTT
ggggcacaccccatggacta

SEQ ID NO: 30883 - DNA, 20 bp, Artificial Sequence
  Description of Artificial Sequence: Synthetic oligonucleotide
  Target: COL7A1; (+) strand; PAM type: YTN; PAM sequence: TTG
gggcacaccccatggactaa

SEQ ID NO: 30884 - DNA, 20 bp, Artificial Sequence
  Description of Artificial Sequence: Synthetic oligonucleotide
  Target: COL7A1; (+) strand; PAM type: YTN; PAM sequence: CTA
agaggaccccaaaaagatct

SEQ ID NO: 30885 - DNA, 20 bp, Artificial Sequence
  Description of Artificial Sequence: Synthetic oligonucleotide
  Target: COL7A1; (+) strand; PAM type: YTN; PAM sequence: CTC
cctccagggtagagaccccc

SEQ ID NO: 30886 - DNA, 20 bp, Artificial Sequence
  Description of Artificial Sequence: Synthetic oligonucleotide
  Target: COL7A1; (+) strand; PAM type: YTN; PAM sequence: CTC
cagggtagagacccccagga

SEQ ID NO: 30887 - DNA, 20 bp, Artificial Sequence
  Description of Artificial Sequence: Synthetic oligonucleotide
  Target: COL7A1; (+) strand; PAM type: YTN; PAM sequence: CTG
agaggtcccattgagatccc

SEQ ID NO: 30888 - DNA, 20 bp, Artificial Sequence
  Description of Artificial Sequence: Synthetic oligonucleotide
  Target: COL7A1; (+) strand; PAM type: YTN; PAM sequence: TTG
agatccctcaggcacagacc

SEQ ID NO: 30889 - DNA, 20 bp, Artificial Sequence
  Description of Artificial Sequence: Synthetic oligonucleotide
  Target: COL7A1; (+) strand; PAM type: YTN; PAM sequence: CTC
aggcacagaccccatggatg

SEQ ID NO: 30890 - DNA, 20 bp, Artificial Sequence
  Description of Artificial Sequence: Synthetic oligonucleotide
  Target: COL7A1; (+) strand; PAM type: YTN; PAM sequence: CTG
ctgagactcccaagggaaga

SEQ ID NO: 30891 - DNA, 20 bp, Artificial Sequence
  Description of Artificial Sequence: Synthetic oligonucleotide
  Target: COL7A1; (+) strand; PAM type: YTN; PAM sequence: CTG
agactcccaagggaagaacc

SEQ ID NO: 30892 - DNA, 20 bp, Artificial Sequence
  Description of Artificial Sequence: Synthetic oligonucleotide
  Target: COL7A1; (+) strand; PAM type: YTN; PAM sequence: CTC
ccaagggaagaacccccagg

SEQ ID NO: 30893 - DNA, 20 bp, Artificial Sequence
  Description of Artificial Sequence: Synthetic oligonucleotide
  Target: COL7A1; (+) strand; PAM type: YTN; PAM sequence: CTT
ggagggcctatgaagacccc

SEQ ID NO: 30894 - DNA, 20 bp, Artificial Sequence
  Description of Artificial Sequence: Synthetic oligonucleotide
  Target: COL7A1; (+) strand; PAM type: YTN; PAM sequence: TTG
gagggcctatgaagaccccc

SEQ ID NO: 30895 - DNA, 20 bp, Artificial Sequence
  Description of Artificial Sequence: Synthetic oligonucleotide
  Target: COL7A1; (+) strand; PAM type: YTN; PAM sequence: CTA
tgaagacccccaaggcaaag

SEQ ID NO: 30896 - DNA, 20 bp, Artificial Sequence
  Description of Artificial Sequence: Synthetic oligonucleotide
  Target: COL7A1; (+) strand; PAM type: YTN; PAM sequence: TTC
tactaaaacctgtgtgccag

SEQ ID NO: 30897 - DNA, 20 bp, Artificial Sequence
  Description of Artificial Sequence: Synthetic oligonucleotide
  Target: COL7A1; (+) strand; PAM type: YTN; PAM sequence: CTA
ctaaaacctgtgtgccaggg

SEQ ID NO: 30898 - DNA, 20 bp, Artificial Sequence
  Description of Artificial Sequence: Synthetic oligonucleotide
  Target: COL7A1; (+) strand; PAM type: YTN; PAM sequence: CTA
aaacctgtgtgccagggact

SEQ ID NO: 30899 - DNA, 20 bp, Artificial Sequence
  Description of Artificial Sequence: Synthetic oligonucleotide
  Target: COL7A1; (+) strand; PAM type: YTN; PAM sequence: CTG
tgtgccagggactgagaccc

SEQ ID NO: 30900 - DNA, 20 bp, Artificial Sequence
  Description of Artificial Sequence: Synthetic oligonucleotide
  Target: COL7A1; (+) strand; PAM type: YTN; PAM sequence: CTG
agaccctcccaaaggcaagg

SEQ ID NO: 30901 - DNA, 20 bp, Artificial Sequence
  Description of Artificial Sequence: Synthetic oligonucleotide
  Target: COL7A1; (+) strand; PAM type: YTN; PAM sequence: CTC
ccaaaggcaaggctgaaccg

SEQ ID NO: 30902 - DNA, 20 bp, Artificial Sequence
  Description of Artificial Sequence: Synthetic oligonucleotide
  Target: COL7A1; (+) strand; PAM type: YTN; PAM sequence: CTG
aaccgaccccccaccaactc

SEQ ID NO: 30903 - DNA, 20 bp, Artificial Sequence
  Description of Artificial Sequence: Synthetic oligonucleotide
  Target: COL7A1; (+) strand; PAM type: YTN; PAM sequence: CTC
tctcggatgctgtgactatg

SEQ ID NO: 30904 - DNA, 20 bp, Artificial Sequence
  Description of Artificial Sequence: Synthetic oligonucleotide
  Target: COL7A1; (+) strand; PAM type: YTN; PAM sequence: CTC
tcggatgctgtgactatgat

SEQ ID NO: 30905 - DNA, 20 bp, Artificial Sequence
  Description of Artificial Sequence: Synthetic oligonucleotide
  Target: COL7A1; (+) strand; PAM type: YTN; PAM sequence: CTC
ggatgctgtgactatgatga

SEQ ID NO: 30906 - DNA, 20 bp, Artificial Sequence
  Description of Artificial Sequence: Synthetic oligonucleotide
  Target: COL7A1; (+) strand; PAM type: YTN; PAM sequence: CTG
tgactatgatgatctggttg

SEQ ID NO: 30907 - DNA, 20 bp, Artificial Sequence
  Description of Artificial Sequence: Synthetic oligonucleotide
  Target: COL7A1; (+) strand; PAM type: YTN; PAM sequence: CTA
tgatgatctggttggagctt

SEQ ID NO: 30908 - DNA, 20 bp, Artificial Sequence
  Description of Artificial Sequence: Synthetic oligonucleotide
  Target: COL7A1; (+) strand; PAM type: YTN; PAM sequence: CTG
gttggagcttacgcagcccc

SEQ ID NO: 30909 - DNA, 20 bp, Artificial Sequence
  Description of Artificial Sequence: Synthetic oligonucleotide
  Target: COL7A1; (+) strand; PAM type: YTN; PAM sequence: TTG
gagcttacgcagccccgagc

SEQ ID NO: 30910 - DNA, 20 bp, Artificial Sequence
  Description of Artificial Sequence: Synthetic oligonucleotide
  Target: COL7A1; (+) strand; PAM type: YTN; PAM sequence: CTT
acgcagccccgagccccctc

SEQ ID NO: 30911 - DNA, 20 bp, Artificial Sequence
  Description of Artificial Sequence: Synthetic oligonucleotide
  Target: COL7A1; (+) strand; PAM type: YTN; PAM sequence: TTA
cgcagccccgagccccctct

SEQ ID NO: 30912 - DNA, 20 bp, Artificial Sequence
  Description of Artificial Sequence: Synthetic oligonucleotide
  Target: COL7A1; (+) strand; PAM type: YTN; PAM sequence: CTC
tgtcccagcatctcccctca

SEQ ID NO: 30913 - DNA, 20 bp, Artificial Sequence
  Description of Artificial Sequence: Synthetic oligonucleotide
  Target: COL7A1; (+) strand; PAM type: YTN; PAM sequence: CTG
tcccagcatctcccctcact

SEQ ID NO: 30914 - DNA, 20 bp, Artificial Sequence
  Description of Artificial Sequence: Synthetic oligonucleotide
  Target: COL7A1; (+) strand; PAM type: YTN; PAM sequence: CTC
ccctcacttacgtctctccc

SEQ ID NO: 30915 - DNA, 20 bp, Artificial Sequence
  Description of Artificial Sequence: Synthetic oligonucleotide
  Target: COL7A1; (+) strand; PAM type: YTN; PAM sequence: CTC
acttacgtctctccctgggt

SEQ ID NO: 30916 - DNA, 20 bp, Artificial Sequence
  Description of Artificial Sequence: Synthetic oligonucleotide
  Target: COL7A1; (+) strand; PAM type: YTN; PAM sequence: CTT
acgtctctccctgggtcccc

SEQ ID NO: 30917 - DNA, 20 bp, Artificial Sequence
  Description of Artificial Sequence: Synthetic oligonucleotide
  Target: COL7A1; (+) strand; PAM type: YTN; PAM sequence: TTA
cgtctctccctgggtcccca

SEQ ID NO: 30918 - DNA, 20 bp, Artificial Sequence
  Description of Artificial Sequence: Synthetic oligonucleotide
  Target: COL7A1; (+) strand; PAM type: YTN; PAM sequence: CTC
tccctgggtccccagctttg

SEQ ID NO: 30919 - DNA, 20 bp, Artificial Sequence
  Description of Artificial Sequence: Synthetic oligonucleotide
  Target: COL7A1; (+) strand; PAM type: YTN; PAM sequence: CTC
cctgggtccccagctttgcc

SEQ ID NO: 30920 - DNA, 20 bp, Artificial Sequence
  Description of Artificial Sequence: Synthetic oligonucleotide
  Target: COL7A1; (+) strand; PAM type: YTN; PAM sequence: CTG
ggtccccagctttgcctgca

SEQ ID NO: 30921 - DNA, 20 bp, Artificial Sequence
  Description of Artificial Sequence: Synthetic oligonucleotide
  Target: COL7A1; (+) strand; PAM type: YTN; PAM sequence: CTT
tgcctgcagcaccctgagga

SEQ ID NO: 30922 - DNA, 20 bp, Artificial Sequence
  Description of Artificial Sequence: Synthetic oligonucleotide
  Target: COL7A1; (+) strand; PAM type: YTN; PAM sequence: TTT
gcctgcagcaccctgaggag

SEQ ID NO: 30923 - DNA, 20 bp, Artificial Sequence
  Description of Artificial Sequence: Synthetic oligonucleotide
  Target: COL7A1; (+) strand; PAM type: YTN; PAM sequence: TTG
cctgcagcaccctgaggaga

SEQ ID NO: 30924 - DNA, 20 bp, Artificial Sequence
  Description of Artificial Sequence: Synthetic oligonucleotide
  Target: COL7A1; (+) strand; PAM type: YTN; PAM sequence: CTG
cagcaccctgaggagagact

SEQ ID NO: 30925 - DNA, 20 bp, Artificial Sequence
  Description of Artificial Sequence: Synthetic oligonucleotide
  Target: COL7A1; (+) strand; PAM type: YTN; PAM sequence: CTG
aggagagactcaaagtcagt

SEQ ID NO: 30926 - DNA, 20 bp, Artificial Sequence
  Description of Artificial Sequence: Synthetic oligonucleotide
  Target: COL7A1; (+) strand; PAM type: YTN; PAM sequence: CTC
aaagtcagttcatcatggtc

SEQ ID NO: 30927 - DNA, 20 bp, Artificial Sequence
  Description of Artificial Sequence: Synthetic oligonucleotide
  Target: COL7A1; (+) strand; PAM type: YTN; PAM sequence: TTC
atcatggtcatggggtcagg

SEQ ID NO: 30928 - DNA, 20 bp, Artificial Sequence
  Description of Artificial Sequence: Synthetic oligonucleotide
  Target: COL7A1; (+) strand; PAM type: YTN; PAM sequence: CTC
tagtccctgtgagcctaagg

SEQ ID NO: 30929 - DNA, 20 bp, Artificial Sequence
  Description of Artificial Sequence: Synthetic oligonucleotide
  Target: COL7A1; (+) strand; PAM type: YTN; PAM sequence: CTA
gtccctgtgagcctaaggcc

SEQ ID NO: 30930 - DNA, 20 bp, Artificial Sequence
  Description of Artificial Sequence: Synthetic oligonucleotide
  Target: COL7A1; (+) strand; PAM type: YTN; PAM sequence: CTG
tgagcctaaggcctgcatgg

SEQ ID NO: 30931 - DNA, 20 bp, Artificial Sequence
  Description of Artificial Sequence: Synthetic oligonucleotide
  Target: COL7A1; (+) strand; PAM type: YTN; PAM sequence: CTA
aggcctgcatggcaagaaca

SEQ ID NO: 30932 - DNA, 20 bp, Artificial Sequence
  Description of Artificial Sequence: Synthetic oligonucleotide
  Target: COL7A1; (+) strand; PAM type: YTN; PAM sequence: CTG
catggcaagaacatgcccca

SEQ ID NO: 30933 - DNA, 20 bp, Artificial Sequence
  Description of Artificial Sequence: Synthetic oligonucleotide
  Target: COL7A1; (+) strand; PAM type: YTN; PAM sequence: CTC
tgggagaagacacagacaac

SEQ ID NO: 30934 - DNA, 20 bp, Artificial Sequence
  Description of Artificial Sequence: Synthetic oligonucleotide
  Target: COL7A1; (+) strand; PAM type: YTN; PAM sequence: CTG
ggagaagacacagacaacag

SEQ ID NO: 30935 - DNA, 20 bp, Artificial Sequence
  Description of Artificial Sequence: Synthetic oligonucleotide
  Target: COL7A1; (+) strand; PAM type: YTN; PAM sequence: CTC
gccccagagctcgtcaaggc

SEQ ID NO: 30936 - DNA, 20 bp, Artificial Sequence
  Description of Artificial Sequence: Synthetic oligonucleotide
  Target: COL7A1; (+) strand; PAM type: YTN; PAM sequence: CTC
gtcaaggccaagaccaacca

SEQ ID NO: 30937 - DNA, 20 bp, Artificial Sequence
  Description of Artificial Sequence: Synthetic oligonucleotide
  Target: COL7A1; (+) strand; PAM type: YTN; PAM sequence: CTG
gggtctagggtcctcatgtg

SEQ ID NO: 30938 - DNA, 20 bp, Artificial Sequence
  Description of Artificial Sequence: Synthetic oligonucleotide
  Target: COL7A1; (+) strand; PAM type: YTN; PAM sequence: CTA
gggtcctcatgtgaaggggt

SEQ ID NO: 30939 - DNA, 20 bp, Artificial Sequence
  Description of Artificial Sequence: Synthetic oligonucleotide
  Target: COL7A1; (+) strand; PAM type: YTN; PAM sequence: CTC
atgtgaaggggtaggggaag

SEQ ID NO: 30940 - DNA, 20 bp, Artificial Sequence
  Description of Artificial Sequence: Synthetic oligonucleotide
  Target: COL7A1; (+) strand; PAM type: YTN; PAM sequence: CTA
ccaagactcacattcggccc

SEQ ID NO: 30941 - DNA, 20 bp, Artificial Sequence
  Description of Artificial Sequence: Synthetic oligonucleotide
  Target: COL7A1; (+) strand; PAM type: YTN; PAM sequence: CTC
acattcggcccagagggccc

SEQ ID NO: 30942 - DNA, 20 bp, Artificial Sequence
  Description of Artificial Sequence: Synthetic oligonucleotide
  Target: COL7A1; (+) strand; PAM type: YTN; PAM sequence: TTC
ggcccagagggcccagcggc

SEQ ID NO: 30943 - DNA, 20 bp, Artificial Sequence
  Description of Artificial Sequence: Synthetic oligonucleotide
  Target: COL7A1; (+) strand; PAM type: YTN; PAM sequence: CTC
ctggtttcccatccagtccg

SEQ ID NO: 30944 - DNA, 20 bp, Artificial Sequence
  Description of Artificial Sequence: Synthetic oligonucleotide
  Target: COL7A1; (+) strand; PAM type: YTN; PAM sequence: CTG
gtttcccatccagtccgctc

SEQ ID NO: 30945 - DNA, 20 bp, Artificial Sequence
  Description of Artificial Sequence: Synthetic oligonucleotide
  Target: COL7A1; (+) strand; PAM type: YTN; PAM sequence: TTT
cccatccagtccgctccggc

SEQ ID NO: 30946 - DNA, 20 bp, Artificial Sequence
  Description of Artificial Sequence: Synthetic oligonucleotide
  Target: COL7A1; (+) strand; PAM type: YTN; PAM sequence: TTC
ccatccagtccgctccggcc

SEQ ID NO: 30947 - DNA, 20 bp, Artificial Sequence
  Description of Artificial Sequence: Synthetic oligonucleotide
  Target: COL7A1; (+) strand; PAM type: YTN; PAM sequence: CTC
cggccatccagcccaggggg

SEQ ID NO: 30948 - DNA, 20 bp, Artificial Sequence
  Description of Artificial Sequence: Synthetic oligonucleotide
  Target: COL7A1; (+) strand; PAM type: YTN; PAM sequence: CTG
tggaaaatagagtggtaaga

SEQ ID NO: 30949 - DNA, 20 bp, Artificial Sequence
  Description of Artificial Sequence: Synthetic oligonucleotide
  Target: COL7A1; (+) strand; PAM type: YTN; PAM sequence: CTG
aggtggatctgataacccag

SEQ ID NO: 30950 - DNA, 20 bp, Artificial Sequence
  Description of Artificial Sequence: Synthetic oligonucleotide
  Target: COL7A1; (+) strand; PAM type: YTN; PAM sequence: CTG
ataacccaggctcatgtcct

SEQ ID NO: 30951 - DNA, 20 bp, Artificial Sequence
  Description of Artificial Sequence: Synthetic oligonucleotide
  Target: COL7A1; (+) strand; PAM type: YTN; PAM sequence: CTC
atgtcctgagaaacccccac

SEQ ID NO: 30952 - DNA, 20 bp, Artificial Sequence
  Description of Artificial Sequence: Synthetic oligonucleotide
  Target: COL7A1; (+) strand; PAM type: YTN; PAM sequence: CTG
agaaacccccacaccctctc

SEQ ID NO: 30953 - DNA, 20 bp, Artificial Sequence
  Description of Artificial Sequence: Synthetic oligonucleotide
  Target: COL7A1; (+) strand; PAM type: YTN; PAM sequence: CTC
tcaccttttctcctgctggg

SEQ ID NO: 30954 - DNA, 20 bp, Artificial Sequence
  Description of Artificial Sequence: Synthetic oligonucleotide
  Target: COL7A1; (+) strand; PAM type: YTN; PAM sequence: CTC
accttttctcctgctgggcc

SEQ ID NO: 30955 - DNA, 20 bp, Artificial Sequence
  Description of Artificial Sequence: Synthetic oligonucleotide
  Target: COL7A1; (+) strand; PAM type: YTN; PAM sequence: CTT
ttctcctgctgggcctcgga

SEQ ID NO: 30956 - DNA, 20 bp, Artificial Sequence
  Description of Artificial Sequence: Synthetic oligonucleotide
  Target: COL7A1; (+) strand; PAM type: YTN; PAM sequence: TTT
tctcctgctgggcctcggac

SEQ ID NO: 30957 - DNA, 20 bp, Artificial Sequence
  Description of Artificial Sequence: Synthetic oligonucleotide
  Target: COL7A1; (+) strand; PAM type: YTN; PAM sequence: TTT
ctcctgctgggcctcggaca

SEQ ID NO: 30958 - DNA, 20 bp, Artificial Sequence
  Description of Artificial Sequence: Synthetic oligonucleotide
  Target: COL7A1; (+) strand; PAM type: YTN; PAM sequence: TTC
tcctgctgggcctcggacac

SEQ ID NO: 30959 - DNA, 20 bp, Artificial Sequence
  Description of Artificial Sequence: Synthetic oligonucleotide
  Target: COL7A1; (+) strand; PAM type: YTN; PAM sequence: CTC
ctgctgggcctcggacacct

SEQ ID NO: 30960 - DNA, 20 bp, Artificial Sequence
  Description of Artificial Sequence: Synthetic oligonucleotide
  Target: COL7A1; (+) strand; PAM type: YTN; PAM sequence: CTG
ctgggcctcggacacctggg

SEQ ID NO: 30961 - DNA, 20 bp, Artificial Sequence
  Description of Artificial Sequence: Synthetic oligonucleotide
  Target: COL7A1; (+) strand; PAM type: YTN; PAM sequence: CTG
ggcctcggacacctgggtcc

SEQ ID NO: 30962 - DNA, 20 bp, Artificial Sequence
  Description of Artificial Sequence: Synthetic oligonucleotide
  Target: COL7A1; (+) strand; PAM type: YTN; PAM sequence: CTC
ggacacctgggtccccctgg

SEQ ID NO: 30963 - DNA, 20 bp, Artificial Sequence
  Description of Artificial Sequence: Synthetic oligonucleotide
  Target: COL7A1; (+) strand; PAM type: YTN; PAM sequence: CTG
ggtccccctggagggaacag

SEQ ID NO: 30964 - DNA, 20 bp, Artificial Sequence
  Description of Artificial Sequence: Synthetic oligonucleotide
  Target: COL7A1; (+) strand; PAM type: YTN; PAM sequence: CTG
gagggaacagggtcagataa

SEQ ID NO: 30965 - DNA, 20 bp, Artificial Sequence
  Description of Artificial Sequence: Synthetic oligonucleotide
  Target: COL7A1; (+) strand; PAM type: YTN; PAM sequence: CTT
ggcagacggggcaaagtgca

SEQ ID NO: 30966 - DNA, 20 bp, Artificial Sequence
  Description of Artificial Sequence: Synthetic oligonucleotide
  Target: COL7A1; (+) strand; PAM type: YTN; PAM sequence: TTG
gcagacggggcaaagtgcat

SEQ ID NO: 30967 - DNA, 20 bp, Artificial Sequence
  Description of Artificial Sequence: Synthetic oligonucleotide
  Target: COL7A1; (+) strand; PAM type: YTN; PAM sequence: CTC
acctgtgggcctgggggtcc

SEQ ID NO: 30968 - DNA, 20 bp, Artificial Sequence
  Description of Artificial Sequence: Synthetic oligonucleotide
  Target: COL7A1; (+) strand; PAM type: YTN; PAM sequence: CTG
tgggcctgggggtccccgaa

SEQ ID NO: 30969 - DNA, 20 bp, Artificial Sequence
  Description of Artificial Sequence: Synthetic oligonucleotide
  Target: COL7A1; (+) strand; PAM type: YTN; PAM sequence: CTG
ggggtccccgaaacccttca

SEQ ID NO: 30970 - DNA, 20 bp, Artificial Sequence
  Description of Artificial Sequence: Synthetic oligonucleotide
  Target: COL7A1; (+) strand; PAM type: YTN; PAM sequence: CTT
caatgccctgaggatagggg

SEQ ID NO: 30971 - DNA, 20 bp, Artificial Sequence
  Description of Artificial Sequence: Synthetic oligonucleotide
  Target: COL7A1; (+) strand; PAM type: YTN; PAM sequence: TTC
aatgccctgaggatagggga

SEQ ID NO: 30972 - DNA, 20 bp, Artificial Sequence
  Description of Artificial Sequence: Synthetic oligonucleotide
  Target: COL7A1; (+) strand; PAM type: YTN; PAM sequence: CTG
aggataggggaggaagaaat

SEQ ID NO: 30973 - DNA, 20 bp, Artificial Sequence
  Description of Artificial Sequence: Synthetic oligonucleotide
  Target: COL7A1; (+) strand; PAM type: YTN; PAM sequence: CTC
ccatgcctgcacccccgagg

SEQ ID NO: 30974 - DNA, 20 bp, Artificial Sequence
  Description of Artificial Sequence: Synthetic oligonucleotide
  Target: COL7A1; (+) strand; PAM type: YTN; PAM sequence: CTG
cacccccgaggaccaatcac

SEQ ID NO: 30975 - DNA, 20 bp, Artificial Sequence
  Description of Artificial Sequence: Synthetic oligonucleotide
  Target: COL7A1; (+) strand; PAM type: YTN; PAM sequence: CTC
accctttccccaggggctcc

SEQ ID NO: 30976 - DNA, 20 bp, Artificial Sequence
  Description of Artificial Sequence: Synthetic oligonucleotide
  Target: COL7A1; (+) strand; PAM type: YTN; PAM sequence: CTT
tccccaggggctccagggag

SEQ ID NO: 30977 - DNA, 20 bp, Artificial Sequence
  Description of Artificial Sequence: Synthetic oligonucleotide
  Target: COL7A1; (+) strand; PAM type: YTN; PAM sequence: TTT
ccccaggggctccagggagg

SEQ ID NO: 30978 - DNA, 20 bp, Artificial Sequence
  Description of Artificial Sequence: Synthetic oligonucleotide
  Target: COL7A1; (+) strand; PAM type: YTN; PAM sequence: TTC
cccaggggctccagggaggc

SEQ ID NO: 30979 - DNA, 20 bp, Artificial Sequence
  Description of Artificial Sequence: Synthetic oligonucleotide
  Target: COL7A1; (+) strand; PAM type: YTN; PAM sequence: CTC
cagggaggccaggatcaccc

SEQ ID NO: 30980 - DNA, 20 bp, Artificial Sequence
  Description of Artificial Sequence: Synthetic oligonucleotide
  Target: COL7A1; (+) strand; PAM type: YTN; PAM sequence: CTT
gggccctcgaggaccctctt

SEQ ID NO: 30981 - DNA, 20 bp, Artificial Sequence
  Description of Artificial Sequence: Synthetic oligonucleotide
  Target: COL7A1; (+) strand; PAM type: YTN; PAM sequence: TTG
ggccctcgaggaccctcttg

SEQ ID NO: 30982 - DNA, 20 bp, Artificial Sequence
  Description of Artificial Sequence: Synthetic oligonucleotide
  Target: COL7A1; (+) strand; PAM type: YTN; PAM sequence: CTC
gaggaccctcttgtccgcgg

SEQ ID NO: 30983 - DNA, 20 bp, Artificial Sequence
  Description of Artificial Sequence: Synthetic oligonucleotide
  Target: COL7A1; (+) strand; PAM type: YTN; PAM sequence: CTC
ttgtccgcggtccccaggct

SEQ ID NO: 30984 - DNA, 20 bp, Artificial Sequence
  Description of Artificial Sequence: Synthetic oligonucleotide
  Target: COL7A1; (+) strand; PAM type: YTN; PAM sequence: CTT
gtccgcggtccccaggctct

SEQ ID NO: 30985 - DNA, 20 bp, Artificial Sequence
  Description of Artificial Sequence: Synthetic oligonucleotide
  Target: COL7A1; (+) strand; PAM type: YTN; PAM sequence: TTG
tccgcggtccccaggctctc

SEQ ID NO: 30986 - DNA, 20 bp, Artificial Sequence
  Description of Artificial Sequence: Synthetic oligonucleotide
  Target: COL7A1; (+) strand; PAM type: YTN; PAM sequence: CTC
tccctgtggcagagataagc

SEQ ID NO: 30987 - DNA, 20 bp, Artificial Sequence
  Description of Artificial Sequence: Synthetic oligonucleotide
  Target: COL7A1; (+) strand; PAM type: YTN; PAM sequence: CTC
cctgtggcagagataagctt

SEQ ID NO: 30988 - DNA, 20 bp, Artificial Sequence
  Description of Artificial Sequence: Synthetic oligonucleotide
  Target: COL7A1; (+) strand; PAM type: YTN; PAM sequence: CTG
tggcagagataagcttgctg

SEQ ID NO: 30989 - DNA, 20 bp, Artificial Sequence
  Description of Artificial Sequence: Synthetic oligonucleotide
  Target: COL7A1; (+) strand; PAM type: YTN; PAM sequence: CTT
gctgaggaacagccttgaag

SEQ ID NO: 30990 - DNA, 20 bp, Artificial Sequence
  Description of Artificial Sequence: Synthetic oligonucleotide
  Target: COL7A1; (+) strand; PAM type: YTN; PAM sequence: TTG
ctgaggaacagccttgaagc

SEQ ID NO: 30991 - DNA, 20 bp, Artificial Sequence
  Description of Artificial Sequence: Synthetic oligonucleotide
  Target: COL7A1; (+) strand; PAM type: YTN; PAM sequence: CTG
aggaacagccttgaagccaa

SEQ ID NO: 30992 - DNA, 20 bp, Artificial Sequence
  Description of Artificial Sequence: Synthetic oligonucleotide
  Target: COL7A1; (+) strand; PAM type: YTN; PAM sequence: CTT
gaagccaagccatgcccaag

SEQ ID NO: 30993 - DNA, 20 bp, Artificial Sequence
  Description of Artificial Sequence: Synthetic oligonucleotide
  Target: COL7A1; (+) strand; PAM type: YTN; PAM sequence: TTG
aagccaagccatgcccaagg

SEQ ID NO: 30994 - DNA, 20 bp, Artificial Sequence
  Description of Artificial Sequence: Synthetic oligonucleotide
  Target: COL7A1; (+) strand; PAM type: YTN; PAM sequence: CTG
ctgggaggggcactggggtc

SEQ ID NO: 30995 - DNA, 20 bp, Artificial Sequence
  Description of Artificial Sequence: Synthetic oligonucleotide
  Target: COL7A1; (+) strand; PAM type: YTN; PAM sequence: CTG
ggaggggcactggggtcttt

SEQ ID NO: 30996 - DNA, 20 bp, Artificial Sequence
  Description of Artificial Sequence: Synthetic oligonucleotide
  Target: COL7A1; (+) strand; PAM type: YTN; PAM sequence: CTG
gggtctttcttaccctccac

SEQ ID NO: 30997 - DNA, 20 bp, Artificial Sequence
  Description of Artificial Sequence: Synthetic oligonucleotide
  Target: COL7A1; (+) strand; PAM type: YTN; PAM sequence: CTT
tcttaccctccacccacaga

SEQ ID NO: 30998 - DNA, 20 bp, Artificial Sequence
  Description of Artificial Sequence: Synthetic oligonucleotide
  Target: COL7A1; (+) strand; PAM type: YTN; PAM sequence: TTT
cttaccctccacccacagac

SEQ ID NO: 30999 - DNA, 20 bp, Artificial Sequence
  Description of Artificial Sequence: Synthetic oligonucleotide
  Target: COL7A1; (+) strand; PAM type: YTN; PAM sequence: TTC
ttaccctccacccacagacc

SEQ ID NO: 31000 - DNA, 20 bp, Artificial Sequence
  Description of Artificial Sequence: Synthetic oligonucleotide
  Target: COL7A1; (+) strand; PAM type: YTN; PAM sequence: CTT
accctccacccacagaccct

SEQ ID NO: 31001 - DNA, 20 bp, Artificial Sequence
  Description of Artificial Sequence: Synthetic oligonucleotide
  Target: COL7A1; (+) strand; PAM type: YTN; PAM sequence: TTA
ccctccacccacagacccta

SEQ ID NO: 31002 - DNA, 20 bp, Artificial Sequence
  Description of Artificial Sequence: Synthetic oligonucleotide
  Target: COL7A1; (+) strand; PAM type: YTN; PAM sequence: CTC
cacccacagaccctaatacc

SEQ ID NO: 31003 - DNA, 20 bp, Artificial Sequence
  Description of Artificial Sequence: Synthetic oligonucleotide
  Target: COL7A1; (+) strand; PAM type: YTN; PAM sequence: CTA
ataccttctctctggctcca

SEQ ID NO: 31004 - DNA, 20 bp, Artificial Sequence
  Description of Artificial Sequence: Synthetic oligonucleotide
  Target: COL7A1; (+) strand; PAM type: YTN; PAM sequence: CTT
ctctctggctccaggtcctg

SEQ ID NO: 31005 - DNA, 20 bp, Artificial Sequence
  Description of Artificial Sequence: Synthetic oligonucleotide
  Target: COL7A1; (+) strand; PAM type: YTN; PAM sequence: TTC
tctctggctccaggtcctgt

SEQ ID NO: 31006 - DNA, 20 bp, Artificial Sequence
  Description of Artificial Sequence: Synthetic oligonucleotide
  Target: COL7A1; (+) strand; PAM type: YTN; PAM sequence: CTC
tctggctccaggtcctgtgt

SEQ ID NO: 31007 - DNA, 20 bp, Artificial Sequence
  Description of Artificial Sequence: Synthetic oligonucleotide
  Target: COL7A1; (+) strand; PAM type: YTN; PAM sequence: CTC
tggctccaggtcctgtgtct

SEQ ID NO: 31008 - DNA, 20 bp, Artificial Sequence
  Description of Artificial Sequence: Synthetic oligonucleotide
  Target: COL7A1; (+) strand; PAM type: YTN; PAM sequence: CTG
gctccaggtcctgtgtctac

SEQ ID NO: 31009 - DNA, 20 bp, Artificial Sequence
  Description of Artificial Sequence: Synthetic oligonucleotide
  Target: COL7A1; (+) strand; PAM type: YTN; PAM sequence: CTC
caggtcctgtgtctacctgt

SEQ ID NO: 31010 - DNA, 20 bp, Artificial Sequence
  Description of Artificial Sequence: Synthetic oligonucleotide
  Target: COL7A1; (+) strand; PAM type: YTN; PAM sequence: CTG
tgtctacctgtggggggaat

SEQ ID NO: 31011 - DNA, 20 bp, Artificial Sequence
  Description of Artificial Sequence: Synthetic oligonucleotide
  Target: COL7A1; (+) strand; PAM type: YTN; PAM sequence: CTA
cctgtggggggaatgaccag

SEQ ID NO: 31012 - DNA, 20 bp, Artificial Sequence
  Description of Artificial Sequence: Synthetic oligonucleotide
  Target: COL7A1; (+) strand; PAM type: YTN; PAM sequence: CTG
tggggggaatgaccagtgag

SEQ ID NO: 31013 - DNA, 20 bp, Artificial Sequence
  Description of Artificial Sequence: Synthetic oligonucleotide
  Target: COL7A1; (+) strand; PAM type: YTN; PAM sequence: CTC
aacaaggggaagaggagttg

SEQ ID NO: 31014 - DNA, 20 bp, Artificial Sequence
  Description of Artificial Sequence: Synthetic oligonucleotide
  Target: COL7A1; (+) strand; PAM type: YTN; PAM sequence: TTG
gcgaggggatacagggtctg

SEQ ID NO: 31015 - DNA, 20 bp, Artificial Sequence
  Description of Artificial Sequence: Synthetic oligonucleotide
  Target: COL7A1; (+) strand; PAM type: YTN; PAM sequence: CTG
tgaggggctccagggatccg

SEQ ID NO: 31016 - DNA, 20 bp, Artificial Sequence
  Description of Artificial Sequence: Synthetic oligonucleotide
  Target: COL7A1; (+) strand; PAM type: YTN; PAM sequence: CTC
cagggatccgcggaggtttc

SEQ ID NO: 31017 - DNA, 20 bp, Artificial Sequence
  Description of Artificial Sequence: Synthetic oligonucleotide
  Target: COL7A1; (+) strand; PAM type: YTN; PAM sequence: TTT
cagagggacagtgggggaag

SEQ ID NO: 31018 - DNA, 20 bp, Artificial Sequence
  Description of Artificial Sequence: Synthetic oligonucleotide
  Target: COL7A1; (+) strand; PAM type: YTN; PAM sequence: TTC
agagggacagtgggggaagt

SEQ ID NO: 31019 - DNA, 20 bp, Artificial Sequence
  Description of Artificial Sequence: Synthetic oligonucleotide
  Target: COL7A1; (+) strand; PAM type: YTN; PAM sequence: TTA
gtggaaggaatgaggggaca

SEQ ID NO: 31020 - DNA, 20 bp, Artificial Sequence
  Description of Artificial Sequence: Synthetic oligonucleotide
  Target: COL7A1; (+) strand; PAM type: YTN; PAM sequence: CTT
accagccgtcccgggggtcc

SEQ ID NO: 31021 - DNA, 20 bp, Artificial Sequence
  Description of Artificial Sequence: Synthetic oligonucleotide
  Target: COL7A1; (+) strand; PAM type: YTN; PAM sequence: TTA
ccagccgtcccgggggtcct

SEQ ID NO: 31022 - DNA, 20 bp, Artificial Sequence
  Description of Artificial Sequence: Synthetic oligonucleotide
  Target: COL7A1; (+) strand; PAM type: YTN; PAM sequence: CTG
ggggaccctgggaaaggaaa

SEQ ID NO: 31023 - DNA, 20 bp, Artificial Sequence
  Description of Artificial Sequence: Synthetic oligonucleotide
  Target: COL7A1; (+) strand; PAM type: YTN; PAM sequence: CTG
ggaaaggaaatgattatagt

SEQ ID NO: 31024 - DNA, 20 bp, Artificial Sequence
  Description of Artificial Sequence: Synthetic oligonucleotide
  Target: COL7A1; (+) strand; PAM type: YTN; PAM sequence: TTA
tagtcaataggagccctcag

SEQ ID NO: 31025 - DNA, 20 bp, Artificial Sequence
  Description of Artificial Sequence: Synthetic oligonucleotide
  Target: COL7A1; (+) strand; PAM type: YTN; PAM sequence: CTC
aggtcccaggccatggctct

SEQ ID NO: 31026 - DNA, 20 bp, Artificial Sequence
  Description of Artificial Sequence: Synthetic oligonucleotide
  Target: COL7A1; (+) strand; PAM type: YTN; PAM sequence: CTC
tggtttgccccaggctcaac

SEQ ID NO: 31027 - DNA, 20 bp, Artificial Sequence
  Description of Artificial Sequence: Synthetic oligonucleotide
  Target: COL7A1; (+) strand; PAM type: YTN; PAM sequence: CTG
gtttgccccaggctcaactc

SEQ ID NO: 31028 - DNA, 20 bp, Artificial Sequence
  Description of Artificial Sequence: Synthetic oligonucleotide
  Target: COL7A1; (+) strand; PAM type: YTN; PAM sequence: TTT
gccccaggctcaactctgcc

SEQ ID NO: 31029 - DNA, 20 bp, Artificial Sequence
  Description of Artificial Sequence: Synthetic oligonucleotide
  Target: COL7A1; (+) strand; PAM type: YTN; PAM sequence: TTG
ccccaggctcaactctgccc

SEQ ID NO: 31030 - DNA, 20 bp, Artificial Sequence
  Description of Artificial Sequence: Synthetic oligonucleotide
  Target: COL7A1; (+) strand; PAM type: YTN; PAM sequence: CTC
aactctgcccccaagttccc

SEQ ID NO: 31031 - DNA, 20 bp, Artificial Sequence
  Description of Artificial Sequence: Synthetic oligonucleotide
  Target: COL7A1; (+) strand; PAM type: YTN; PAM sequence: CTC
tgcccccaagttccccgaag

SEQ ID NO: 31032 - DNA, 20 bp, Artificial Sequence
  Description of Artificial Sequence: Synthetic oligonucleotide
  Target: COL7A1; (+) strand; PAM type: YTN; PAM sequence: CTG
cccccaagttccccgaagca

SEQ ID NO: 31033 - DNA, 20 bp, Artificial Sequence
  Description of Artificial Sequence: Synthetic oligonucleotide
  Target: COL7A1; (+) strand; PAM type: YTN; PAM sequence: TTC
cccgaagcaccccaatgcca

SEQ ID NO: 31034 - DNA, 20 bp, Artificial Sequence
  Description of Artificial Sequence: Synthetic oligonucleotide
  Target: COL7A1; (+) strand; PAM type: YTN; PAM sequence: CTT
cccacctggacctccagacc

SEQ ID NO: 31035 - DNA, 20 bp, Artificial Sequence
  Description of Artificial Sequence: Synthetic oligonucleotide
  Target: COL7A1; (+) strand; PAM type: YTN; PAM sequence: TTC
ccacctggacctccagaccc

SEQ ID NO: 31036 - DNA, 20 bp, Artificial Sequence
  Description of Artificial Sequence: Synthetic oligonucleotide
  Target: COL7A1; (+) strand; PAM type: YTN; PAM sequence: CTG
gacctccagaccccttgtgt

SEQ ID NO: 31037 - DNA, 20 bp, Artificial Sequence
  Description of Artificial Sequence: Synthetic oligonucleotide
  Target: COL7A1; (+) strand; PAM type: YTN; PAM sequence: CTC
cagaccccttgtgtgaaggc

SEQ ID NO: 31038 - DNA, 20 bp, Artificial Sequence
  Description of Artificial Sequence: Synthetic oligonucleotide
  Target: COL7A1; (+) strand; PAM type: YTN; PAM sequence: CTT
gtgtgaaggcacactggcag

SEQ ID NO: 31039 - DNA, 20 bp, Artificial Sequence
  Description of Artificial Sequence: Synthetic oligonucleotide
  Target: COL7A1; (+) strand; PAM type: YTN; PAM sequence: TTG
tgtgaaggcacactggcagc

SEQ ID NO: 31040 - DNA, 20 bp, Artificial Sequence
  Description of Artificial Sequence: Synthetic oligonucleotide
  Target: COL7A1; (+) strand; PAM type: YTN; PAM sequence: CTG
gcagcagcgccaggggaccc

SEQ ID NO: 31041 - DNA, 20 bp, Artificial Sequence
  Description of Artificial Sequence: Synthetic oligonucleotide
  Target: COL7A1; (+) strand; PAM type: YTN; PAM sequence: CTC
catcccttctgagcccagga

SEQ ID NO: 31042 - DNA, 20 bp, Artificial Sequence
  Description of Artificial Sequence: Synthetic oligonucleotide
  Target: COL7A1; (+) strand; PAM type: YTN; PAM sequence: CTT
ctgagcccaggacaccagcc

SEQ ID NO: 31043 - DNA, 20 bp, Artificial Sequence
  Description of Artificial Sequence: Synthetic oligonucleotide
  Target: COL7A1; (+) strand; PAM type: YTN; PAM sequence: TTC
tgagcccaggacaccagccc

SEQ ID NO: 31044 - DNA, 20 bp, Artificial Sequence
  Description of Artificial Sequence: Synthetic oligonucleotide
  Target: COL7A1; (+) strand; PAM type: YTN; PAM sequence: CTG
agcccaggacaccagcccta

SEQ ID NO: 31045 - DNA, 20 bp, Artificial Sequence
  Description of Artificial Sequence: Synthetic oligonucleotide
  Target: COL7A1; (+) strand; PAM type: YTN; PAM sequence: CTA
ctcaccggctccccacggtc

SEQ ID NO: 31046 - DNA, 20 bp, Artificial Sequence
  Description of Artificial Sequence: Synthetic oligonucleotide
  Target: COL7A1; (+) strand; PAM type: YTN; PAM sequence: CTC
accggctccccacggtcacc

SEQ ID NO: 31047 - DNA, 20 bp, Artificial Sequence
  Description of Artificial Sequence: Synthetic oligonucleotide
  Target: COL7A1; (+) strand; PAM type: YTN; PAM sequence: CTC
cccacggtcacccttgggtc

SEQ ID NO: 31048 - DNA, 20 bp, Artificial Sequence
  Description of Artificial Sequence: Synthetic oligonucleotide
  Target: COL7A1; (+) strand; PAM type: YTN; PAM sequence: CTT
gggtccagatgatccagggc

SEQ ID NO: 31049 - DNA, 20 bp, Artificial Sequence
  Description of Artificial Sequence: Synthetic oligonucleotide
  Target: COL7A1; (+) strand; PAM type: YTN; PAM sequence: TTG
ggtccagatgatccagggct

SEQ ID NO: 31050 - DNA, 20 bp, Artificial Sequence
  Description of Artificial Sequence: Synthetic oligonucleotide
  Target: COL7A1; (+) strand; PAM type: YTN; PAM sequence: CTG
ccctgcagaaaggcaggggt

SEQ ID NO: 31051 - DNA, 20 bp, Artificial Sequence
  Description of Artificial Sequence: Synthetic oligonucleotide
  Target: COL7A1; (+) strand; PAM type: YTN; PAM sequence: CTG
cagaaaggcaggggtcaggg

SEQ ID NO: 31052 - DNA, 20 bp, Artificial Sequence
  Description of Artificial Sequence: Synthetic oligonucleotide
  Target: COL7A1; (+) strand; PAM type: YTN; PAM sequence: CTC
aaggtaggcagcagtttggg

SEQ ID NO: 31053 - DNA, 20 bp, Artificial Sequence
  Description of Artificial Sequence: Synthetic oligonucleotide
  Target: COL7A1; (+) strand; PAM type: YTN; PAM sequence: TTT
gggagagctttggaagcacc

SEQ ID NO: 31054 - DNA, 20 bp, Artificial Sequence
  Description of Artificial Sequence: Synthetic oligonucleotide
  Target: COL7A1; (+) strand; PAM type: YTN; PAM sequence: TTG
ggagagctttggaagcacca

SEQ ID NO: 31055 - DNA, 20 bp, Artificial Sequence
  Description of Artificial Sequence: Synthetic oligonucleotide
  Target: COL7A1; (+) strand; PAM type: YTN; PAM sequence: CTT
tggaagcaccatgaggactc

SEQ ID NO: 31056 - DNA, 20 bp, Artificial Sequence
  Description of Artificial Sequence: Synthetic oligonucleotide
  Target: COL7A1; (+) strand; PAM type: YTN; PAM sequence: TTT
ggaagcaccatgaggactca

SEQ ID NO: 31057 - DNA, 20 bp, Artificial Sequence
  Description of Artificial Sequence: Synthetic oligonucleotide
  Target: COL7A1; (+) strand; PAM type: YTN; PAM sequence: TTG
gaagcaccatgaggactcat

SEQ ID NO: 31058 - DNA, 20 bp, Artificial Sequence
  Description of Artificial Sequence: Synthetic oligonucleotide
  Target: COL7A1; (+) strand; PAM type: YTN; PAM sequence: CTC
atgggaatgttggtagcctt

SEQ ID NO: 31059 - DNA, 20 bp, Artificial Sequence
  Description of Artificial Sequence: Synthetic oligonucleotide
  Target: COL7A1; (+) strand; PAM type: YTN; PAM sequence: TTG
gtagccttcagatgcgtgtg

SEQ ID NO: 31060 - DNA, 20 bp, Artificial Sequence
  Description of Artificial Sequence: Synthetic oligonucleotide
  Target: COL7A1; (+) strand; PAM type: YTN; PAM sequence: CTT
cagatgcgtgtgtgcagggg

SEQ ID NO: 31061 - DNA, 20 bp, Artificial Sequence
  Description of Artificial Sequence: Synthetic oligonucleotide
  Target: COL7A1; (+) strand; PAM type: YTN; PAM sequence: TTC
agatgcgtgtgtgcaggggt

SEQ ID NO: 31062 - DNA, 20 bp, Artificial Sequence
  Description of Artificial Sequence: Synthetic oligonucleotide
  Target: COL7A1; (+) strand; PAM type: YTN; PAM sequence: TTG
ggagggtttagcattacagg

SEQ ID NO: 31063 - DNA, 20 bp, Artificial Sequence
  Description of Artificial Sequence: Synthetic oligonucleotide
  Target: COL7A1; (+) strand; PAM type: YTN; PAM sequence: TTT
agcattacagggttgggggg

SEQ ID NO: 31064 - DNA, 20 bp, Artificial Sequence
  Description of Artificial Sequence: Synthetic oligonucleotide
  Target: COL7A1; (+) strand; PAM type: YTN; PAM sequence: TTA
gcattacagggttggggggt

SEQ ID NO: 31065 - DNA, 20 bp, Artificial Sequence
  Description of Artificial Sequence: Synthetic oligonucleotide
  Target: COL7A1; (+) strand; PAM type: YTN; PAM sequence: TTA
cagggttggggggtaggatc

SEQ ID NO: 31066 - DNA, 20 bp, Artificial Sequence
  Description of Artificial Sequence: Synthetic oligonucleotide
  Target: COL7A1; (+) strand; PAM type: YTN; PAM sequence: TTG
gggggtaggatcaggtattg

SEQ ID NO: 31067 - DNA, 20 bp, Artificial Sequence
  Description of Artificial Sequence: Synthetic oligonucleotide
  Target: COL7A1; (+) strand; PAM type: YTN; PAM sequence: TTG
ggaattggctggttggaggg

SEQ ID NO: 31068 - DNA, 20 bp, Artificial Sequence
  Description of Artificial Sequence: Synthetic oligonucleotide
  Target: COL7A1; (+) strand; PAM type: YTN; PAM sequence: TTG
gctggttggagggttaaggt

SEQ ID NO: 31069 - DNA, 20 bp, Artificial Sequence
  Description of Artificial Sequence: Synthetic oligonucleotide
  Target: COL7A1; (+) strand; PAM type: YTN; PAM sequence: CTG
gttggagggttaaggttggg

SEQ ID NO: 31070 - DNA, 20 bp, Artificial Sequence
  Description of Artificial Sequence: Synthetic oligonucleotide
  Target: COL7A1; (+) strand; PAM type: YTN; PAM sequence: TTG
gagggttaaggttggggtga

SEQ ID NO: 31071 - DNA, 20 bp, Artificial Sequence
  Description of Artificial Sequence: Synthetic oligonucleotide
  Target: COL7A1; (+) strand; PAM type: YTN; PAM sequence: TTA
aggttggggtgaggagtcat

SEQ ID NO: 31072 - DNA, 20 bp, Artificial Sequence
  Description of Artificial Sequence: Synthetic oligonucleotide
  Target: COL7A1; (+) strand; PAM type: YTN; PAM sequence: TTG
gggtgaggagtcataggctg

SEQ ID NO: 31073 - DNA, 20 bp, Artificial Sequence
  Description of Artificial Sequence: Synthetic oligonucleotide
  Target: COL7A1; (+) strand; PAM type: YTN; PAM sequence: CTG
ggactcacatttcgtccatc

SEQ ID NO: 31074 - DNA, 20 bp, Artificial Sequence
  Description of Artificial Sequence: Synthetic oligonucleotide
  Target: COL7A1; (+) strand; PAM type: YTN; PAM sequence: CTC
acatttcgtccatcctctcc

SEQ ID NO: 31075 - DNA, 20 bp, Artificial Sequence
  Description of Artificial Sequence: Synthetic oligonucleotide
  Target: COL7A1; (+) strand; PAM type: YTN; PAM sequence: TTT
cgtccatcctctccaggatc

SEQ ID NO: 31076 - DNA, 20 bp, Artificial Sequence
  Description of Artificial Sequence: Synthetic oligonucleotide
  Target: COL7A1; (+) strand; PAM type: YTN; PAM sequence: TTC
gtccatcctctccaggatct

SEQ ID NO: 31077 - DNA, 20 bp, Artificial Sequence
  Description of Artificial Sequence: Synthetic oligonucleotide
  Target: COL7A1; (+) strand; PAM type: YTN; PAM sequence: CTC
tccaggatctccctggtctc

SEQ ID NO: 31078 - DNA, 20 bp, Artificial Sequence
  Description of Artificial Sequence: Synthetic oligonucleotide
  Target: COL7A1; (+) strand; PAM type: YTN; PAM sequence: CTC
caggatctccctggtctccc

SEQ ID NO: 31079 - DNA, 20 bp, Artificial Sequence
  Description of Artificial Sequence: Synthetic oligonucleotide
  Target: COL7A1; (+) strand; PAM type: YTN; PAM sequence: CTC
cctggtctcccttttcaccc

SEQ ID NO: 31080 - DNA, 20 bp, Artificial Sequence
  Description of Artificial Sequence: Synthetic oligonucleotide
  Target: COL7A1; (+) strand; PAM type: YTN; PAM sequence: CTG
gtctcccttttcacccacag

SEQ ID NO: 31081 - DNA, 20 bp, Artificial Sequence
  Description of Artificial Sequence: Synthetic oligonucleotide
  Target: COL7A1; (+) strand; PAM type: YTN; PAM sequence: CTC
ccttttcacccacaggcccc

SEQ ID NO: 31082 - DNA, 20 bp, Artificial Sequence
  Description of Artificial Sequence: Synthetic oligonucleotide
  Target: COL7A1; (+) strand; PAM type: YTN; PAM sequence: CTT
ttcacccacaggcccccgaa

SEQ ID NO: 31083 - DNA, 20 bp, Artificial Sequence
  Description of Artificial Sequence: Synthetic oligonucleotide
  Target: COL7A1; (+) strand; PAM type: YTN; PAM sequence: TTT
tcacccacaggcccccgaac

SEQ ID NO: 31084 - DNA, 20 bp, Artificial Sequence
  Description of Artificial Sequence: Synthetic oligonucleotide
  Target: COL7A1; (+) strand; PAM type: YTN; PAM sequence: TTT
cacccacaggcccccgaact

SEQ ID NO: 31085 - DNA, 20 bp, Artificial Sequence
  Description of Artificial Sequence: Synthetic oligonucleotide
  Target: COL7A1; (+) strand; PAM type: YTN; PAM sequence: TTC
acccacaggcccccgaactc

SEQ ID NO: 31086 - DNA, 20 bp, Artificial Sequence
  Description of Artificial Sequence: Synthetic oligonucleotide
  Target: COL7A1; (+) strand; PAM type: YTN; PAM sequence: CTC
caggtgccccctaagaagag

SEQ ID NO: 31087 - DNA, 20 bp, Artificial Sequence
  Description of Artificial Sequence: Synthetic oligonucleotide
  Target: COL7A1; (+) strand; PAM type: YTN; PAM sequence: CTA
agaagagcagctggcctgag

SEQ ID NO: 31088 - DNA, 20 bp, Artificial Sequence
  Description of Artificial Sequence: Synthetic oligonucleotide
  Target: COL7A1; (+) strand; PAM type: YTN; PAM sequence: CTG
gcctgagacagaccctccca

SEQ ID NO: 31089 - DNA, 20 bp, Artificial Sequence
  Description of Artificial Sequence: Synthetic oligonucleotide
  Target: COL7A1; (+) strand; PAM type: YTN; PAM sequence: CTG
agacagaccctcccaatatt

SEQ ID NO: 31090 - DNA, 20 bp, Artificial Sequence
  Description of Artificial Sequence: Synthetic oligonucleotide
  Target: COL7A1; (+) strand; PAM type: YTN; PAM sequence: CTC
ccaatattttgcaggtgccc

SEQ ID NO: 31091 - DNA, 20 bp, Artificial Sequence
  Description of Artificial Sequence: Synthetic oligonucleotide
  Target: COL7A1; (+) strand; PAM type: YTN; PAM sequence: TTT
tgcaggtgcccctatgaccc

SEQ ID NO: 31092 - DNA, 20 bp, Artificial Sequence
  Description of Artificial Sequence: Synthetic oligonucleotide
  Target: COL7A1; (+) strand; PAM type: YTN; PAM sequence: TTT
gcaggtgcccctatgacccg

SEQ ID NO: 31093 - DNA, 20 bp, Artificial Sequence
  Description of Artificial Sequence: Synthetic oligonucleotide
  Target: COL7A1; (+) strand; PAM type: YTN; PAM sequence: TTG
caggtgcccctatgacccgc

SEQ ID NO: 31094 - DNA, 20 bp, Artificial Sequence
  Description of Artificial Sequence: Synthetic oligonucleotide
  Target: COL7A1; (+) strand; PAM type: YTN; PAM sequence: CTA
tgacccgctacactgcccca

SEQ ID NO: 31095 - DNA, 20 bp, Artificial Sequence
  Description of Artificial Sequence: Synthetic oligonucleotide
  Target: COL7A1; (+) strand; PAM type: YTN; PAM sequence: CTA
cactgccccaggttccccat

SEQ ID NO: 31096 - DNA, 20 bp, Artificial Sequence
  Description of Artificial Sequence: Synthetic oligonucleotide
  Target: COL7A1; (+) strand; PAM type: YTN; PAM sequence: CTG
ccccaggttccccattactc

SEQ ID NO: 31097 - DNA, 20 bp, Artificial Sequence
  Description of Artificial Sequence: Synthetic oligonucleotide
  Target: COL7A1; (+) strand; PAM type: YTN; PAM sequence: TTC
cccattactccaaaatccac

SEQ ID NO: 31098 - DNA, 20 bp, Artificial Sequence
  Description of Artificial Sequence: Synthetic oligonucleotide
  Target: COL7A1; (+) strand; PAM type: YTN; PAM sequence: TTA
ctccaaaatccacatcagag

SEQ ID NO: 31099 - DNA, 20 bp, Artificial Sequence
  Description of Artificial Sequence: Synthetic oligonucleotide
  Target: COL7A1; (+) strand; PAM type: YTN; PAM sequence: CTC
caaaatccacatcagaggtt

SEQ ID NO: 31100 - DNA, 20 bp, Artificial Sequence
  Description of Artificial Sequence: Synthetic oligonucleotide
  Target: COL7A1; (+) strand; PAM type: YTN; PAM sequence: TTC
ccatcaccccatgcctccct

SEQ ID NO: 31101 - DNA, 20 bp, Artificial Sequence
  Description of Artificial Sequence: Synthetic oligonucleotide
  Target: COL7A1; (+) strand; PAM type: YTN; PAM sequence: CTC
cctgcagggactcccatcac

SEQ ID NO: 31102 - DNA, 20 bp, Artificial Sequence
  Description of Artificial Sequence: Synthetic oligonucleotide
  Target: COL7A1; (+) strand; PAM type: YTN; PAM sequence: CTG
cagggactcccatcacccct

SEQ ID NO: 31103 - DNA, 20 bp, Artificial Sequence
  Description of Artificial Sequence: Synthetic oligonucleotide
  Target: COL7A1; (+) strand; PAM type: YTN; PAM sequence: CTC
ccatcaccccttacccccct

SEQ ID NO: 31104 - DNA, 20 bp, Artificial Sequence
  Description of Artificial Sequence: Synthetic oligonucleotide
  Target: COL7A1; (+) strand; PAM type: YTN; PAM sequence: CTT
acccccctcagcctttccta

SEQ ID NO: 31105 - DNA, 20 bp, Artificial Sequence
  Description of Artificial Sequence: Synthetic oligonucleotide
  Target: COL7A1; (+) strand; PAM type: YTN; PAM sequence: TTA
cccccctcagcctttcctat

SEQ ID NO: 31106 - DNA, 20 bp, Artificial Sequence
  Description of Artificial Sequence: Synthetic oligonucleotide
  Target: COL7A1; (+) strand; PAM type: YTN; PAM sequence: CTC
agcctttcctatcaccttca

SEQ ID NO: 31107 - DNA, 20 bp, Artificial Sequence
  Description of Artificial Sequence: Synthetic oligonucleotide
  Target: COL7A1; (+) strand; PAM type: YTN; PAM sequence: CTT
tcctatcaccttcatgccca

SEQ ID NO: 31108 - DNA, 20 bp, Artificial Sequence
  Description of Artificial Sequence: Synthetic oligonucleotide
  Target: COL7A1; (+) strand; PAM type: YTN; PAM sequence: TTT
cctatcaccttcatgcccac

SEQ ID NO: 31109 - DNA, 20 bp, Artificial Sequence
  Description of Artificial Sequence: Synthetic oligonucleotide
  Target: COL7A1; (+) strand; PAM type: YTN; PAM sequence: TTC
ctatcaccttcatgcccacc

SEQ ID NO: 31110 - DNA, 20 bp, Artificial Sequence
  Description of Artificial Sequence: Synthetic oligonucleotide
  Target: COL7A1; (+) strand; PAM type: YTN; PAM sequence: CTA
tcaccttcatgcccacctcc

SEQ ID NO: 31111 - DNA, 20 bp, Artificial Sequence
  Description of Artificial Sequence: Synthetic oligonucleotide
  Target: COL7A1; (+) strand; PAM type: YTN; PAM sequence: CTT
catgcccacctcccatcacc

SEQ ID NO: 31112 - DNA, 20 bp, Artificial Sequence
  Description of Artificial Sequence: Synthetic oligonucleotide
  Target: COL7A1; (+) strand; PAM type: YTN; PAM sequence: TTC
atgcccacctcccatcaccc

SEQ ID NO: 31113 - DNA, 20 bp, Artificial Sequence
  Description of Artificial Sequence: Synthetic oligonucleotide
  Target: COL7A1; (+) strand; PAM type: YTN; PAM sequence: CTC
ccatcacccctgttacttct

SEQ ID NO: 31114 - DNA, 20 bp, Artificial Sequence
  Description of Artificial Sequence: Synthetic oligonucleotide
  Target: COL7A1; (+) strand; PAM type: YTN; PAM sequence: CTG
ttacttctctctgccaagac

SEQ ID NO: 31115 - DNA, 20 bp, Artificial Sequence
  Description of Artificial Sequence: Synthetic oligonucleotide
  Target: COL7A1; (+) strand; PAM type: YTN; PAM sequence: TTA
cttctctctgccaagactca

SEQ ID NO: 31116 - DNA, 20 bp, Artificial Sequence
  Description of Artificial Sequence: Synthetic oligonucleotide
  Target: COL7A1; (+) strand; PAM type: YTN; PAM sequence: CTT
ctctctgccaagactcaccc

SEQ ID NO: 31117 - DNA, 20 bp, Artificial Sequence
  Description of Artificial Sequence: Synthetic oligonucleotide
  Target: COL7A1; (+) strand; PAM type: YTN; PAM sequence: TTC
tctctgccaagactcacccg

SEQ ID NO: 31118 - DNA, 20 bp, Artificial Sequence
  Description of Artificial Sequence: Synthetic oligonucleotide
  Target: COL7A1; (+) strand; PAM type: YTN; PAM sequence: CTC
tctgccaagactcacccgaa

SEQ ID NO: 31119 - DNA, 20 bp, Artificial Sequence
  Description of Artificial Sequence: Synthetic oligonucleotide
  Target: COL7A1; (+) strand; PAM type: YTN; PAM sequence: CTC
tgccaagactcacccgaagg

SEQ ID NO: 31120 - DNA, 20 bp, Artificial Sequence
  Description of Artificial Sequence: Synthetic oligonucleotide
  Target: COL7A1; (+) strand; PAM type: YTN; PAM sequence: CTG
ccaagactcacccgaaggcc

SEQ ID NO: 31121 - DNA, 20 bp, Artificial Sequence
  Description of Artificial Sequence: Synthetic oligonucleotide
  Target: COL7A1; (+) strand; PAM type: YTN; PAM sequence: CTC
acccgaaggccacgctcgcc

SEQ ID NO: 31122 - DNA, 20 bp, Artificial Sequence
  Description of Artificial Sequence: Synthetic oligonucleotide
  Target: COL7A1; (+) strand; PAM type: YTN; PAM sequence: CTC
gcctgcttttccaggcaaac

SEQ ID NO: 31123 - DNA, 20 bp, Artificial Sequence
  Description of Artificial Sequence: Synthetic oligonucleotide
  Target: COL7A1; (+) strand; PAM type: YTN; PAM sequence: CTG
cttttccaggcaaacccggg

SEQ ID NO: 31124 - DNA, 20 bp, Artificial Sequence
  Description of Artificial Sequence: Synthetic oligonucleotide
  Target: COL7A1; (+) strand; PAM type: YTN; PAM sequence: CTT
ttccaggcaaacccgggtca

SEQ ID NO: 31125 - DNA, 20 bp, Artificial Sequence
  Description of Artificial Sequence: Synthetic oligonucleotide
  Target: COL7A1; (+) strand; PAM type: YTN; PAM sequence: TTT
tccaggcaaacccgggtcac

SEQ ID NO: 31126 - DNA, 20 bp, Artificial Sequence
  Description of Artificial Sequence: Synthetic oligonucleotide
  Target: COL7A1; (+) strand; PAM type: YTN; PAM sequence: TTT
ccaggcaaacccgggtcacc

SEQ ID NO: 31127 - DNA, 20 bp, Artificial Sequence
  Description of Artificial Sequence: Synthetic oligonucleotide
  Target: COL7A1; (+) strand; PAM type: YTN; PAM sequence: TTC
caggcaaacccgggtcaccc

SEQ ID NO: 31128 - DNA, 20 bp, Artificial Sequence
  Description of Artificial Sequence: Synthetic oligonucleotide
  Target: COL7A1; (+) strand; PAM type: YTN; PAM sequence: CTG
gtgatagagagaaaagtcat

SEQ ID NO: 31129 - DNA, 20 bp, Artificial Sequence
  Description of Artificial Sequence: Synthetic oligonucleotide
  Target: COL7A1; (+) strand; PAM type: YTN; PAM sequence: CTG
cacagggcagtcaggatcta

SEQ ID NO: 31130 - DNA, 20 bp, Artificial Sequence
  Description of Artificial Sequence: Synthetic oligonucleotide
  Target: COL7A1; (+) strand; PAM type: YTN; PAM sequence: CTA
actcactcagggagagggga

SEQ ID NO: 31131 - DNA, 20 bp, Artificial Sequence
  Description of Artificial Sequence: Synthetic oligonucleotide
  Target: COL7A1; (+) strand; PAM type: YTN; PAM sequence: CTC
actcagggagaggggacaga

SEQ ID NO: 31132 - DNA, 20 bp, Artificial Sequence
  Description of Artificial Sequence: Synthetic oligonucleotide
  Target: COL7A1; (+) strand; PAM type: YTN; PAM sequence: CTC
agggagaggggacagagaag

SEQ ID NO: 31133 - DNA, 20 bp, Artificial Sequence
  Description of Artificial Sequence: Synthetic oligonucleotide
  Target: COL7A1; (+) strand; PAM type: YTN; PAM sequence: CTG
agcagcagctggacaggagg

SEQ ID NO: 31134 - DNA, 20 bp, Artificial Sequence
  Description of Artificial Sequence: Synthetic oligonucleotide
  Target: COL7A1; (+) strand; PAM type: YTN; PAM sequence: CTG
gacaggaggcagggagtgga

SEQ ID NO: 31135 - DNA, 20 bp, Artificial Sequence
  Description of Artificial Sequence: Synthetic oligonucleotide
  Target: COL7A1; (+) strand; PAM type: YTN; PAM sequence: CTG
gtggagcaccagcctactgg

SEQ ID NO: 31136 - DNA, 20 bp, Artificial Sequence
  Description of Artificial Sequence: Synthetic oligonucleotide
  Target: COL7A1; (+) strand; PAM type: YTN; PAM sequence: CTA
ctgggatcctagttcaaggg

SEQ ID NO: 31137 - DNA, 20 bp, Artificial Sequence
  Description of Artificial Sequence: Synthetic oligonucleotide
  Target: COL7A1; (+) strand; PAM type: YTN; PAM sequence: CTG
ggatcctagttcaagggtaa

SEQ ID NO: 31138 - DNA, 20 bp, Artificial Sequence
  Description of Artificial Sequence: Synthetic oligonucleotide
  Target: COL7A1; (+) strand; PAM type: YTN; PAM sequence: CTA
gttcaagggtaaaggatcag

SEQ ID NO: 31139 - DNA, 20 bp, Artificial Sequence
  Description of Artificial Sequence: Synthetic oligonucleotide
  Target: COL7A1; (+) strand; PAM type: YTN; PAM sequence: TTC
aagggtaaaggatcagaaac

SEQ ID NO: 31140 - DNA, 20 bp, Artificial Sequence
  Description of Artificial Sequence: Synthetic oligonucleotide
  Target: COL7A1; (+) strand; PAM type: YTN; PAM sequence: CTC
accggaggaccctcgtcacc

SEQ ID NO: 31141 - DNA, 20 bp, Artificial Sequence
  Description of Artificial Sequence: Synthetic oligonucleotide
  Target: COL7A1; (+) strand; PAM type: YTN; PAM sequence: CTC
gtcacctttctctccaactt

SEQ ID NO: 31142 - DNA, 20 bp, Artificial Sequence
  Description of Artificial Sequence: Synthetic oligonucleotide
  Target: COL7A1; (+) strand; PAM type: YTN; PAM sequence: CTT
tctctccaacttcaccctgt

SEQ ID NO: 31143 - DNA, 20 bp, Artificial Sequence
  Description of Artificial Sequence: Synthetic oligonucleotide
  Target: COL7A1; (+) strand; PAM type: YTN; PAM sequence: TTT
ctctccaacttcaccctgtg

SEQ ID NO: 31144 - DNA, 20 bp, Artificial Sequence
  Description of Artificial Sequence: Synthetic oligonucleotide
  Target: COL7A1; (+) strand; PAM type: YTN; PAM sequence: TTC
tctccaacttcaccctgtga

SEQ ID NO: 31145 - DNA, 20 bp, Artificial Sequence
  Description of Artificial Sequence: Synthetic oligonucleotide
  Target: COL7A1; (+) strand; PAM type: YTN; PAM sequence: CTC
tccaacttcaccctgtgaaa

SEQ ID NO: 31146 - DNA, 20 bp, Artificial Sequence
  Description of Artificial Sequence: Synthetic oligonucleotide
  Target: COL7A1; (+) strand; PAM type: YTN; PAM sequence: CTC
caacttcaccctgtgaaaca

SEQ ID NO: 31147 - DNA, 20 bp, Artificial Sequence
  Description of Artificial Sequence: Synthetic oligonucleotide
  Target: COL7A1; (+) strand; PAM type: YTN; PAM sequence: CTT
caccctgtgaaacatgagag

SEQ ID NO: 31148 - DNA, 20 bp, Artificial Sequence
  Description of Artificial Sequence: Synthetic oligonucleotide
  Target: COL7A1; (+) strand; PAM type: YTN; PAM sequence: TTC
accctgtgaaacatgagagt

SEQ ID NO: 31149 - DNA, 20 bp, Artificial Sequence
  Description of Artificial Sequence: Synthetic oligonucleotide
  Target: COL7A1; (+) strand; PAM type: YTN; PAM sequence: CTG
tgaaacatgagagtcagccc

SEQ ID NO: 31150 - DNA, 20 bp, Artificial Sequence
  Description of Artificial Sequence: Synthetic oligonucleotide
  Target: COL7A1; (+) strand; PAM type: YTN; PAM sequence: CTG
gttccaagaacccccatgat

SEQ ID NO: 31151 - DNA, 20 bp, Artificial Sequence
  Description of Artificial Sequence: Synthetic oligonucleotide
  Target: COL7A1; (+) strand; PAM type: YTN; PAM sequence: TTC
caagaacccccatgatgctg

SEQ ID NO: 31152 - DNA, 20 bp, Artificial Sequence
  Description of Artificial Sequence: Synthetic oligonucleotide
  Target: COL7A1; (+) strand; PAM type: YTN; PAM sequence: CTG
gcaacagccctactccctta

SEQ ID NO: 31153 - DNA, 20 bp, Artificial Sequence
  Description of Artificial Sequence: Synthetic oligonucleotide
  Target: COL7A1; (+) strand; PAM type: YTN; PAM sequence: CTA
ctcccttacccgccatgact

SEQ ID NO: 31154 - DNA, 20 bp, Artificial Sequence
  Description of Artificial Sequence: Synthetic oligonucleotide
  Target: COL7A1; (+) strand; PAM type: YTN; PAM sequence: CTC
ccttacccgccatgactccc

SEQ ID NO: 31155 - DNA, 20 bp, Artificial Sequence
  Description of Artificial Sequence: Synthetic oligonucleotide
  Target: COL7A1; (+) strand; PAM type: YTN; PAM sequence: CTT
acccgccatgactcccccga

SEQ ID NO: 31156 - DNA, 20 bp, Artificial Sequence
  Description of Artificial Sequence: Synthetic oligonucleotide
  Target: COL7A1; (+) strand; PAM type: YTN; PAM sequence: TTA
cccgccatgactcccccgac

SEQ ID NO: 31157 - DNA, 20 bp, Artificial Sequence
  Description of Artificial Sequence: Synthetic oligonucleotide
  Target: COL7A1; (+) strand; PAM type: YTN; PAM sequence: CTC
ccccgactccagcctcttac

SEQ ID NO: 31158 - DNA, 20 bp, Artificial Sequence
  Description of Artificial Sequence: Synthetic oligonucleotide
  Target: COL7A1; (+) strand; PAM type: YTN; PAM sequence: CTC
cagcctcttacatctcgtcc

SEQ ID NO: 31159 - DNA, 20 bp, Artificial Sequence
  Description of Artificial Sequence: Synthetic oligonucleotide
  Target: COL7A1; (+) strand; PAM type: YTN; PAM sequence: CTC
ttacatctcgtcctcggggg

SEQ ID NO: 31160 - DNA, 20 bp, Artificial Sequence
  Description of Artificial Sequence: Synthetic oligonucleotide
  Target: COL7A1; (+) strand; PAM type: YTN; PAM sequence: CTT
acatctcgtcctcgggggcc

SEQ ID NO: 31161 - DNA, 20 bp, Artificial Sequence
  Description of Artificial Sequence: Synthetic oligonucleotide
  Target: COL7A1; (+) strand; PAM type: YTN; PAM sequence: TTA
catctcgtcctcgggggcca

SEQ ID NO: 31162 - DNA, 20 bp, Artificial Sequence
  Description of Artificial Sequence: Synthetic oligonucleotide
  Target: COL7A1; (+) strand; PAM type: YTN; PAM sequence: CTC
gtcctcgggggccaacaggt

SEQ ID NO: 31163 - DNA, 20 bp, Artificial Sequence
  Description of Artificial Sequence: Synthetic oligonucleotide
  Target: COL7A1; (+) strand; PAM type: YTN; PAM sequence: CTC
gggggccaacaggtcctggg

SEQ ID NO: 31164 - DNA, 20 bp, Artificial Sequence
  Description of Artificial Sequence: Synthetic oligonucleotide
  Target: COL7A1; (+) strand; PAM type: YTN; PAM sequence: CTG
gggggccaggccgcccaggg

SEQ ID NO: 31165 - DNA, 20 bp, Artificial Sequence
  Description of Artificial Sequence: Synthetic oligonucleotide
  Target: COL7A1; (+) strand; PAM type: YTN; PAM sequence: CTC
ccttctctccaggaggccct

SEQ ID NO: 31166 - DNA, 20 bp, Artificial Sequence
  Description of Artificial Sequence: Synthetic oligonucleotide
  Target: COL7A1; (+) strand; PAM type: YTN; PAM sequence: CTT
ctctccaggaggccctgagt

SEQ ID NO: 31167 - DNA, 20 bp, Artificial Sequence
  Description of Artificial Sequence: Synthetic oligonucleotide
  Target: COL7A1; (+) strand; PAM type: YTN; PAM sequence: TTC
tctccaggaggccctgagtc

SEQ ID NO: 31168 - DNA, 20 bp, Artificial Sequence
  Description of Artificial Sequence: Synthetic oligonucleotide
  Target: COL7A1; (+) strand; PAM type: YTN; PAM sequence: CTC
tccaggaggccctgagtcac

SEQ ID NO: 31169 - DNA, 20 bp, Artificial Sequence
  Description of Artificial Sequence: Synthetic oligonucleotide
  Target: COL7A1; (+) strand; PAM type: YTN; PAM sequence: CTC
caggaggccctgagtcaccc

SEQ ID NO: 31170 - DNA, 20 bp, Artificial Sequence
  Description of Artificial Sequence: Synthetic oligonucleotide
  Target: COL7A1; (+) strand; PAM type: YTN; PAM sequence: CTG
agtcaccctgtggaggaggc

SEQ ID NO: 31171 - DNA, 20 bp, Artificial Sequence
  Description of Artificial Sequence: Synthetic oligonucleotide
  Target: COL7A1; (+) strand; PAM type: YTN; PAM sequence: CTG
tggaggaggcaagagggagg

SEQ ID NO: 31172 - DNA, 20 bp, Artificial Sequence
  Description of Artificial Sequence: Synthetic oligonucleotide
  Target: COL7A1; (+) strand; PAM type: YTN; PAM sequence: CTC
gaagcaagcagttctcaagg

SEQ ID NO: 31173 - DNA, 20 bp, Artificial Sequence
  Description of Artificial Sequence: Synthetic oligonucleotide
  Target: COL7A1; (+) strand; PAM type: YTN; PAM sequence: TTC
tcaaggggaggggaccccag

SEQ ID NO: 31174 - DNA, 20 bp, Artificial Sequence
  Description of Artificial Sequence: Synthetic oligonucleotide
  Target: COL7A1; (+) strand; PAM type: YTN; PAM sequence: CTC
aaggggaggggaccccagaa

SEQ ID NO: 31175 - DNA, 20 bp, Artificial Sequence
  Description of Artificial Sequence: Synthetic oligonucleotide
  Target: COL7A1; (+) strand; PAM type: YTN; PAM sequence: CTT
gaggttgcccagggtaacgg

SEQ ID NO: 31176 - DNA, 20 bp, Artificial Sequence
  Description of Artificial Sequence: Synthetic oligonucleotide
  Target: COL7A1; (+) strand; PAM type: YTN; PAM sequence: TTG
aggttgcccagggtaacggg

SEQ ID NO: 31177 - DNA, 20 bp, Artificial Sequence
  Description of Artificial Sequence: Synthetic oligonucleotide
  Target: COL7A1; (+) strand; PAM type: YTN; PAM sequence: TTG
cccagggtaacgggtactca

SEQ ID NO: 31178 - DNA, 20 bp, Artificial Sequence
  Description of Artificial Sequence: Synthetic oligonucleotide
  Target: COL7A1; (+) strand; PAM type: YTN; PAM sequence: CTC
actgggggtcctgctctgcc

SEQ ID NO: 31179 - DNA, 20 bp, Artificial Sequence
  Description of Artificial Sequence: Synthetic oligonucleotide
  Target: COL7A1; (+) strand; PAM type: YTN; PAM sequence: CTG
ggggtcctgctctgccagta

SEQ ID NO: 31180 - DNA, 20 bp, Artificial Sequence
  Description of Artificial Sequence: Synthetic oligonucleotide
  Target: COL7A1; (+) strand; PAM type: YTN; PAM sequence: CTG
ctctgccagtaaggccaatg

SEQ ID NO: 31181 - DNA, 20 bp, Artificial Sequence
  Description of Artificial Sequence: Synthetic oligonucleotide
  Target: COL7A1; (+) strand; PAM type: YTN; PAM sequence: CTC
tgccagtaaggccaatggga

SEQ ID NO: 31182 - DNA, 20 bp, Artificial Sequence
  Description of Artificial Sequence: Synthetic oligonucleotide
  Target: COL7A1; (+) strand; PAM type: YTN; PAM sequence: CTG
ccagtaaggccaatgggacc

SEQ ID NO: 31183 - DNA, 20 bp, Artificial Sequence
  Description of Artificial Sequence: Synthetic oligonucleotide
  Target: COL7A1; (+) strand; PAM type: YTN; PAM sequence: CTG
aaggggacagaaggggggca

SEQ ID NO: 31184 - DNA, 20 bp, Artificial Sequence
  Description of Artificial Sequence: Synthetic oligonucleotide
  Target: COL7A1; (+) strand; PAM type: YTN; PAM sequence: CTT
agtcagggtcccaccacctc

SEQ ID NO: 31185 - DNA, 20 bp, Artificial Sequence
  Description of Artificial Sequence: Synthetic oligonucleotide
  Target: COL7A1; (+) strand; PAM type: YTN; PAM sequence: TTA
gtcagggtcccaccacctca

SEQ ID NO: 31186 - DNA, 20 bp, Artificial Sequence
  Description of Artificial Sequence: Synthetic oligonucleotide
  Target: COL7A1; (+) strand; PAM type: YTN; PAM sequence: CTC
atctccctctgtcacactcc

SEQ ID NO: 31187 - DNA, 20 bp, Artificial Sequence
  Description of Artificial Sequence: Synthetic oligonucleotide
  Target: COL7A1; (+) strand; PAM type: YTN; PAM sequence: CTC
cctctgtcacactccccatt

SEQ ID NO: 31188 - DNA, 20 bp, Artificial Sequence
  Description of Artificial Sequence: Synthetic oligonucleotide
  Target: COL7A1; (+) strand; PAM type: YTN; PAM sequence: CTC
tgtcacactccccattccca

SEQ ID NO: 31189 - DNA, 20 bp, Artificial Sequence
  Description of Artificial Sequence: Synthetic oligonucleotide
  Target: COL7A1; (+) strand; PAM type: YTN; PAM sequence: CTG
tcacactccccattcccaca

SEQ ID NO: 31190 - DNA, 20 bp, Artificial Sequence
  Description of Artificial Sequence: Synthetic oligonucleotide
  Target: COL7A1; (+) strand; PAM type: YTN; PAM sequence: CTC
cccattcccacattgattca

SEQ ID NO: 31191 - DNA, 20 bp, Artificial Sequence
  Description of Artificial Sequence: Synthetic oligonucleotide
  Target: COL7A1; (+) strand; PAM type: YTN; PAM sequence: TTC
ccacattgattcacccggtc

SEQ ID NO: 31192 - DNA, 20 bp, Artificial Sequence
  Description of Artificial Sequence: Synthetic oligonucleotide
  Target: COL7A1; (+) strand; PAM type: YTN; PAM sequence: TTG
attcacccggtctccagggt

SEQ ID NO: 31193 - DNA, 20 bp, Artificial Sequence
  Description of Artificial Sequence: Synthetic oligonucleotide
  Target: COL7A1; (+) strand; PAM type: YTN; PAM sequence: TTC
acccggtctccagggtctcc

SEQ ID NO: 31194 - DNA, 20 bp, Artificial Sequence
  Description of Artificial Sequence: Synthetic oligonucleotide
  Target: COL7A1; (+) strand; PAM type: YTN; PAM sequence: CTC
cagggtctcccttggggcca

SEQ ID NO: 31195 - DNA, 20 bp, Artificial Sequence
  Description of Artificial Sequence: Synthetic oligonucleotide
  Target: COL7A1; (+) strand; PAM type: YTN; PAM sequence: CTC
ccttggggccagggtctcca

SEQ ID NO: 31196 - DNA, 20 bp, Artificial Sequence
  Description of Artificial Sequence: Synthetic oligonucleotide
  Target: COL7A1; (+) strand; PAM type: YTN; PAM sequence: CTT
ggggccagggtctccaggaa

SEQ ID NO: 31197 - DNA, 20 bp, Artificial Sequence
  Description of Artificial Sequence: Synthetic oligonucleotide
  Target: COL7A1; (+) strand; PAM type: YTN; PAM sequence: TTG
gggccagggtctccaggaag

SEQ ID NO: 31198 - DNA, 20 bp, Artificial Sequence
  Description of Artificial Sequence: Synthetic oligonucleotide
  Target: COL7A1; (+) strand; PAM type: YTN; PAM sequence: CTC
caggaagaaccaagccgggt

SEQ ID NO: 31199 - DNA, 20 bp, Artificial Sequence
  Description of Artificial Sequence: Synthetic oligonucleotide
  Target: COL7A1; (+) strand; PAM type: YTN; PAM sequence: CTG
tggatggaaggataagaagt

SEQ ID NO: 31200 - DNA, 20 bp, Artificial Sequence
  Description of Artificial Sequence: Synthetic oligonucleotide
  Target: COL7A1; (+) strand; PAM type: YTN; PAM sequence: CTT
caccaactgccccctaaaca

SEQ ID NO: 31201 - DNA, 20 bp, Artificial Sequence
  Description of Artificial Sequence: Synthetic oligonucleotide
  Target: COL7A1; (+) strand; PAM type: YTN; PAM sequence: TTC
accaactgccccctaaacac

SEQ ID NO: 31202 - DNA, 20 bp, Artificial Sequence
  Description of Artificial Sequence: Synthetic oligonucleotide
  Target: COL7A1; (+) strand; PAM type: YTN; PAM sequence: CTG
ccccctaaacacttcgcttc

SEQ ID NO: 31203 - DNA, 20 bp, Artificial Sequence
  Description of Artificial Sequence: Synthetic oligonucleotide
  Target: COL7A1; (+) strand; PAM type: YTN; PAM sequence: CTA
aacacttcgcttcacttacc

SEQ ID NO: 31204 - DNA, 20 bp, Artificial Sequence
  Description of Artificial Sequence: Synthetic oligonucleotide
  Target: COL7A1; (+) strand; PAM type: YTN; PAM sequence: CTT
cgcttcacttacccgttccc

SEQ ID NO: 31205 - DNA, 20 bp, Artificial Sequence
  Description of Artificial Sequence: Synthetic oligonucleotide
  Target: COL7A1; (+) strand; PAM type: YTN; PAM sequence: TTC
gcttcacttacccgttcccc

SEQ ID NO: 31206 - DNA, 20 bp, Artificial Sequence
  Description of Artificial Sequence: Synthetic oligonucleotide
  Target: COL7A1; (+) strand; PAM type: YTN; PAM sequence: CTT
cacttacccgttccccttgg

SEQ ID NO: 31207 - DNA, 20 bp, Artificial Sequence
  Description of Artificial Sequence: Synthetic oligonucleotide
  Target: COL7A1; (+) strand; PAM type: YTN; PAM sequence: TTC
acttacccgttccccttgga

SEQ ID NO: 31208 - DNA, 20 bp, Artificial Sequence
  Description of Artificial Sequence: Synthetic oligonucleotide
  Target: COL7A1; (+) strand; PAM type: YTN; PAM sequence: CTT
acccgttccccttggactcc

SEQ ID NO: 31209 - DNA, 20 bp, Artificial Sequence
  Description of Artificial Sequence: Synthetic oligonucleotide
  Target: COL7A1; (+) strand; PAM type: YTN; PAM sequence: TTA
cccgttccccttggactccg

SEQ ID NO: 31210 - DNA, 20 bp, Artificial Sequence
  Description of Artificial Sequence: Synthetic oligonucleotide
  Target: COL7A1; (+) strand; PAM type: YTN; PAM sequence: TTC
cccttggactccggtagctc

SEQ ID NO: 31211 - DNA, 20 bp, Artificial Sequence
  Description of Artificial Sequence: Synthetic oligonucleotide
  Target: COL7A1; (+) strand; PAM type: YTN; PAM sequence: CTT
ggactccggtagctcctctg

SEQ ID NO: 31212 - DNA, 20 bp, Artificial Sequence
  Description of Artificial Sequence: Synthetic oligonucleotide
  Target: COL7A1; (+) strand; PAM type: YTN; PAM sequence: TTG
gactccggtagctcctctgg

SEQ ID NO: 31213 - DNA, 20 bp, Artificial Sequence
  Description of Artificial Sequence: Synthetic oligonucleotide
  Target: COL7A1; (+) strand; PAM type: YTN; PAM sequence: CTC
cggtagctcctctgggccca

SEQ ID NO: 31214 - DNA, 20 bp, Artificial Sequence
  Description of Artificial Sequence: Synthetic oligonucleotide
  Target: COL7A1; (+) strand; PAM type: YTN; PAM sequence: CTC
ctctgggcccagcgggcccc

SEQ ID NO: 31215 - DNA, 20 bp, Artificial Sequence
  Description of Artificial Sequence: Synthetic oligonucleotide
  Target: COL7A1; (+) strand; PAM type: YTN; PAM sequence: CTC
tgggcccagcgggccccaca

SEQ ID NO: 31216 - DNA, 20 bp, Artificial Sequence
  Description of Artificial Sequence: Synthetic oligonucleotide
  Target: COL7A1; (+) strand; PAM type: YTN; PAM sequence: CTG
ggcccagcgggccccacatc

SEQ ID NO: 31217 - DNA, 20 bp, Artificial Sequence
  Description of Artificial Sequence: Synthetic oligonucleotide
  Target: COL7A1; (+) strand; PAM type: YTN; PAM sequence: CTC
cctggaggtgacaaagacca

SEQ ID NO: 31218 - DNA, 20 bp, Artificial Sequence
  Description of Artificial Sequence: Synthetic oligonucleotide
  Target: COL7A1; (+) strand; PAM type: YTN; PAM sequence: CTG
gaggtgacaaagaccatcag

SEQ ID NO: 31219 - DNA, 20 bp, Artificial Sequence
  Description of Artificial Sequence: Synthetic oligonucleotide
  Target: COL7A1; (+) strand; PAM type: YTN; PAM sequence: CTA
gtcccaggctccagttaacc

SEQ ID NO: 31220 - DNA, 20 bp, Artificial Sequence
  Description of Artificial Sequence: Synthetic oligonucleotide
  Target: COL7A1; (+) strand; PAM type: YTN; PAM sequence: CTC
cagttaaccccctgacccag

SEQ ID NO: 31221 - DNA, 20 bp, Artificial Sequence
  Description of Artificial Sequence: Synthetic oligonucleotide
  Target: COL7A1; (+) strand; PAM type: YTN; PAM sequence: TTA
accccctgacccagcaagtc

SEQ ID NO: 31222 - DNA, 20 bp, Artificial Sequence
  Description of Artificial Sequence: Synthetic oligonucleotide
  Target: COL7A1; (+) strand; PAM type: YTN; PAM sequence: CTG
acccagcaagtcctgtgacc

SEQ ID NO: 31223 - DNA, 20 bp, Artificial Sequence
  Description of Artificial Sequence: Synthetic oligonucleotide
  Target: COL7A1; (+) strand; PAM type: YTN; PAM sequence: CTG
tgaccccccaagtcccatag

SEQ ID NO: 31224 - DNA, 20 bp, Artificial Sequence
  Description of Artificial Sequence: Synthetic oligonucleotide
  Target: COL7A1; (+) strand; PAM type: YTN; PAM sequence: CTA
tgacctagacctcaaccctg

SEQ ID NO: 31225 - DNA, 20 bp, Artificial Sequence
  Description of Artificial Sequence: Synthetic oligonucleotide
  Target: COL7A1; (+) strand; PAM type: YTN; PAM sequence: CTA
gacctcaaccctgtagaaac

SEQ ID NO: 31226 - DNA, 20 bp, Artificial Sequence
  Description of Artificial Sequence: Synthetic oligonucleotide
  Target: COL7A1; (+) strand; PAM type: YTN; PAM sequence: CTC
aaccctgtagaaacctcccc

SEQ ID NO: 31227 - DNA, 20 bp, Artificial Sequence
  Description of Artificial Sequence: Synthetic oligonucleotide
  Target: COL7A1; (+) strand; PAM type: YTN; PAM sequence: CTG
tagaaacctccccttgcccc

SEQ ID NO: 31228 - DNA, 20 bp, Artificial Sequence
  Description of Artificial Sequence: Synthetic oligonucleotide
  Target: COL7A1; (+) strand; PAM type: YTN; PAM sequence: CTC
cccttgccccataccaggct

SEQ ID NO: 31229 - DNA, 20 bp, Artificial Sequence
  Description of Artificial Sequence: Synthetic oligonucleotide
  Target: COL7A1; (+) strand; PAM type: YTN; PAM sequence: CTT
gccccataccaggcttacct

SEQ ID NO: 31230 - DNA, 20 bp, Artificial Sequence
  Description of Artificial Sequence: Synthetic oligonucleotide
  Target: COL7A1; (+) strand; PAM type: YTN; PAM sequence: TTG
ccccataccaggcttacctt

SEQ ID NO: 31231 - DNA, 20 bp, Artificial Sequence
  Description of Artificial Sequence: Synthetic oligonucleotide
  Target: COL7A1; (+) strand; PAM type: YTN; PAM sequence: CTT
accttttctcctttgggtcc

SEQ ID NO: 31232 - DNA, 20 bp, Artificial Sequence
  Description of Artificial Sequence: Synthetic oligonucleotide
  Target: COL7A1; (+) strand; PAM type: YTN; PAM sequence: TTA
ccttttctcctttgggtcca

SEQ ID NO: 31233 - DNA, 20 bp, Artificial Sequence
  Description of Artificial Sequence: Synthetic oligonucleotide
  Target: COL7A1; (+) strand; PAM type: YTN; PAM sequence: CTT
ttctcctttgggtccagcaa

SEQ ID NO: 31234 - DNA, 20 bp, Artificial Sequence
  Description of Artificial Sequence: Synthetic oligonucleotide
  Target: COL7A1; (+) strand; PAM type: YTN; PAM sequence: TTT
tctcctttgggtccagcaac

SEQ ID NO: 31235 - DNA, 20 bp, Artificial Sequence
  Description of Artificial Sequence: Synthetic oligonucleotide
  Target: COL7A1; (+) strand; PAM type: YTN; PAM sequence: TTT
ctcctttgggtccagcaaca

SEQ ID NO: 31236 - DNA, 20 bp, Artificial Sequence
  Description of Artificial Sequence: Synthetic oligonucleotide
  Target: COL7A1; (+) strand; PAM type: YTN; PAM sequence: TTC
tcctttgggtccagcaacag

SEQ ID NO: 31237 - DNA, 20 bp, Artificial Sequence
  Description of Artificial Sequence: Synthetic oligonucleotide
  Target: COL7A1; (+) strand; PAM type: YTN; PAM sequence: CTC
ctttgggtccagcaacagca

SEQ ID NO: 31238 - DNA, 20 bp, Artificial Sequence
  Description of Artificial Sequence: Synthetic oligonucleotide
  Target: COL7A1; (+) strand; PAM type: YTN; PAM sequence: CTT
tgggtccagcaacagcaggt

SEQ ID NO: 31239 - DNA, 20 bp, Artificial Sequence
  Description of Artificial Sequence: Synthetic oligonucleotide
  Target: COL7A1; (+) strand; PAM type: YTN; PAM sequence: TTT
gggtccagcaacagcaggtc

SEQ ID NO: 31240 - DNA, 20 bp, Artificial Sequence
  Description of Artificial Sequence: Synthetic oligonucleotide
  Target: COL7A1; (+) strand; PAM type: YTN; PAM sequence: TTG
ggtccagcaacagcaggtcc

SEQ ID NO: 31241 - DNA, 20 bp, Artificial Sequence
  Description of Artificial Sequence: Synthetic oligonucleotide
  Target: COL7A1; (+) strand; PAM type: YTN; PAM sequence: CTG
aaaacaaacaggacagatac

SEQ ID NO: 31242 - DNA, 20 bp, Artificial Sequence
  Description of Artificial Sequence: Synthetic oligonucleotide
  Target: COL7A1; (+) strand; PAM type: YTN; PAM sequence: CTT
ggccctgccttggggttgta

SEQ ID NO: 31243 - DNA, 20 bp, Artificial Sequence
  Description of Artificial Sequence: Synthetic oligonucleotide
  Target: COL7A1; (+) strand; PAM type: YTN; PAM sequence: TTG
gccctgccttggggttgtat

SEQ ID NO: 31244 - DNA, 20 bp, Artificial Sequence
  Description of Artificial Sequence: Synthetic oligonucleotide
  Target: COL7A1; (+) strand; PAM type: YTN; PAM sequence: CTG
ccttggggttgtatgatcaa

SEQ ID NO: 31245 - DNA, 20 bp, Artificial Sequence
  Description of Artificial Sequence: Synthetic oligonucleotide
  Target: COL7A1; (+) strand; PAM type: YTN; PAM sequence: CTT
ggggttgtatgatcaaagtc

SEQ ID NO: 31246 - DNA, 20 bp, Artificial Sequence
  Description of Artificial Sequence: Synthetic oligonucleotide
  Target: COL7A1; (+) strand; PAM type: YTN; PAM sequence: TTG
gggttgtatgatcaaagtct

SEQ ID NO: 31247 - DNA, 20 bp, Artificial Sequence
  Description of Artificial Sequence: Synthetic oligonucleotide
  Target: COL7A1; (+) strand; PAM type: YTN; PAM sequence: TTG
tatgatcaaagtcttcattg

SEQ ID NO: 31248 - DNA, 20 bp, Artificial Sequence
  Description of Artificial Sequence: Synthetic oligonucleotide
  Target: COL7A1; (+) strand; PAM type: YTN; PAM sequence: CTT
cattggaatggaggtcacat

SEQ ID NO: 31249 - DNA, 20 bp, Artificial Sequence
  Description of Artificial Sequence: Synthetic oligonucleotide
  Target: COL7A1; (+) strand; PAM type: YTN; PAM sequence: TTC
attggaatggaggtcacatg

SEQ ID NO: 31250 - DNA, 20 bp, Artificial Sequence
  Description of Artificial Sequence: Synthetic oligonucleotide
  Target: COL7A1; (+) strand; PAM type: YTN; PAM sequence: TTG
gaatggaggtcacatggaat

SEQ ID NO: 31251 - DNA, 20 bp, Artificial Sequence
  Description of Artificial Sequence: Synthetic oligonucleotide
  Target: COL7A1; (+) strand; PAM type: YTN; PAM sequence: TTG
gaagtcatacagctcagtcc

SEQ ID NO: 31252 - DNA, 20 bp, Artificial Sequence
  Description of Artificial Sequence: Synthetic oligonucleotide
  Target: COL7A1; (+) strand; PAM type: YTN; PAM sequence: CTC
agtccccgcccagaagtcac

SEQ ID NO: 31253 - DNA, 20 bp, Artificial Sequence
  Description of Artificial Sequence: Synthetic oligonucleotide
  Target: COL7A1; (+) strand; PAM type: YTN; PAM sequence: CTG
acagcagggaaggggttata

SEQ ID NO: 31254 - DNA, 20 bp, Artificial Sequence
  Description of Artificial Sequence: Synthetic oligonucleotide
  Target: COL7A1; (+) strand; PAM type: YTN; PAM sequence: TTA
tacaaaatggactgacacaa

SEQ ID NO: 31255 - DNA, 20 bp, Artificial Sequence
  Description of Artificial Sequence: Synthetic oligonucleotide
  Target: COL7A1; (+) strand; PAM type: YTN; PAM sequence: CTG
acacaaagagctcatgacct

SEQ ID NO: 31256 - DNA, 20 bp, Artificial Sequence
  Description of Artificial Sequence: Synthetic oligonucleotide
  Target: COL7A1; (+) strand; PAM type: YTN; PAM sequence: CTC
atgacctgcatggcggtctt

SEQ ID NO: 31257 - DNA, 20 bp, Artificial Sequence
  Description of Artificial Sequence: Synthetic oligonucleotide
  Target: COL7A1; (+) strand; PAM type: YTN; PAM sequence: CTG
catggcggtcttggggtcac

SEQ ID NO: 31258 - DNA, 20 bp, Artificial Sequence
  Description of Artificial Sequence: Synthetic oligonucleotide
  Target: COL7A1; (+) strand; PAM type: YTN; PAM sequence: CTT
ggggtcacaggatcatagcc

SEQ ID NO: 31259 - DNA, 20 bp, Artificial Sequence
  Description of Artificial Sequence: Synthetic oligonucleotide
  Target: COL7A1; (+) strand; PAM type: YTN; PAM sequence: TTG
gggtcacaggatcatagcca

SEQ ID NO: 31260 - DNA, 20 bp, Artificial Sequence
  Description of Artificial Sequence: Synthetic oligonucleotide
  Target: COL7A1; (+) strand; PAM type: YTN; PAM sequence: CTG
ggggcaggttctagcagaag

SEQ ID NO: 31261 - DNA, 20 bp, Artificial Sequence
  Description of Artificial Sequence: Synthetic oligonucleotide
  Target: COL7A1; (+) strand; PAM type: YTN; PAM sequence: TTC
tagcagaaggagagccgcag

SEQ ID NO: 31262 - DNA, 20 bp, Artificial Sequence
  Description of Artificial Sequence: Synthetic oligonucleotide
  Target: COL7A1; (+) strand; PAM type: YTN; PAM sequence: CTA
gcagaaggagagccgcagag

SEQ ID NO: 31263 - DNA, 20 bp, Artificial Sequence
  Description of Artificial Sequence: Synthetic oligonucleotide
  Target: COL7A1; (+) strand; PAM type: YTN; PAM sequence: CTC
ccagcctgctcacgggccca

SEQ ID NO: 31264 - DNA, 20 bp, Artificial Sequence
  Description of Artificial Sequence: Synthetic oligonucleotide
  Target: COL7A1; (+) strand; PAM type: YTN; PAM sequence: CTG
ctcacgggcccagcactgtg

SEQ ID NO: 31265 - DNA, 20 bp, Artificial Sequence
  Description of Artificial Sequence: Synthetic oligonucleotide
  Target: COL7A1; (+) strand; PAM type: YTN; PAM sequence: CTC
acgggcccagcactgtggaa

SEQ ID NO: 31266 - DNA, 20 bp, Artificial Sequence
  Description of Artificial Sequence: Synthetic oligonucleotide
  Target: COL7A1; (+) strand; PAM type: YTN; PAM sequence: CTG
tggaatcacagcccagatag

SEQ ID NO: 31267 - DNA, 20 bp, Artificial Sequence
  Description of Artificial Sequence: Synthetic oligonucleotide
  Target: COL7A1; (+) strand; PAM type: YTN; PAM sequence: TTC
tataggagggtcactgctca

SEQ ID NO: 31268 - DNA, 20 bp, Artificial Sequence
  Description of Artificial Sequence: Synthetic oligonucleotide
  Target: COL7A1; (+) strand; PAM type: YTN; PAM sequence: CTA
taggagggtcactgctcaag

SEQ ID NO: 31269 - DNA, 20 bp, Artificial Sequence
  Description of Artificial Sequence: Synthetic oligonucleotide
  Target: COL7A1; (+) strand; PAM type: YTN; PAM sequence: CTG
ctcaagggctgtgctgtgct

SEQ ID NO: 31270 - DNA, 20 bp, Artificial Sequence
  Description of Artificial Sequence: Synthetic oligonucleotide
  Target: COL7A1; (+) strand; PAM type: YTN; PAM sequence: CTC
aagggctgtgctgtgctcag

SEQ ID NO: 31271 - DNA, 20 bp, Artificial Sequence
  Description of Artificial Sequence: Synthetic oligonucleotide
  Target: COL7A1; (+) strand; PAM type: YTN; PAM sequence: CTG
tgctgtgctcagagcgccat

SEQ ID NO: 31272 - DNA, 20 bp, Artificial Sequence
  Description of Artificial Sequence: Synthetic oligonucleotide
  Target: COL7A1; (+) strand; PAM type: YTN; PAM sequence: CTG
tgctcagagcgccatcctcc

SEQ ID NO: 31273 - DNA, 20 bp, Artificial Sequence
  Description of Artificial Sequence: Synthetic oligonucleotide
  Target: COL7A1; (+) strand; PAM type: YTN; PAM sequence: CTC
agagcgccatcctcccgtca

SEQ ID NO: 31274 - DNA, 20 bp, Artificial Sequence
  Description of Artificial Sequence: Synthetic oligonucleotide
  Target: COL7A1; (+) strand; PAM type: YTN; PAM sequence: CTC
ccgtcactcaccaccactgc

SEQ ID NO: 31275 - DNA, 20 bp, Artificial Sequence
  Description of Artificial Sequence: Synthetic oligonucleotide
  Target: COL7A1; (+) strand; PAM type: YTN; PAM sequence: CTC
accaccactgcagggtcccc

SEQ ID NO: 31276 - DNA, 20 bp, Artificial Sequence
  Description of Artificial Sequence: Synthetic oligonucleotide
  Target: COL7A1; (+) strand; PAM type: YTN; PAM sequence: CTG
cagggtccccagggcgacca

SEQ ID NO: 31277 - DNA, 20 bp, Artificial Sequence
  Description of Artificial Sequence: Synthetic oligonucleotide
  Target: COL7A1; (+) strand; PAM type: YTN; PAM sequence: CTC
cccctgtggagagaggatag

SEQ ID NO: 31278 - DNA, 20 bp, Artificial Sequence
  Description of Artificial Sequence: Synthetic oligonucleotide
  Target: COL7A1; (+) strand; PAM type: YTN; PAM sequence: CTG
tggagagaggataggagcag

SEQ ID NO: 31279 - DNA, 20 bp, Artificial Sequence
  Description of Artificial Sequence: Synthetic oligonucleotide
  Target: COL7A1; (+) strand; PAM type: YTN; PAM sequence: CTA
ggagcccaaaatcccagtgt

SEQ ID NO: 31280 - DNA, 20 bp, Artificial Sequence
  Description of Artificial Sequence: Synthetic oligonucleotide
  Target: COL7A1; (+) strand; PAM type: YTN; PAM sequence: CTG
ccacatccctagtaccagac

SEQ ID NO: 31281 - DNA, 20 bp, Artificial Sequence
  Description of Artificial Sequence: Synthetic oligonucleotide
  Target: COL7A1; (+) strand; PAM type: YTN; PAM sequence: CTA
gtaccagacagtgccacccc

SEQ ID NO: 31282 - DNA, 20 bp, Artificial Sequence
  Description of Artificial Sequence: Synthetic oligonucleotide
  Target: COL7A1; (+) strand; PAM type: YTN; PAM sequence: CTT
ctctccttggcggccagtgg

SEQ ID NO: 31283 - DNA, 20 bp, Artificial Sequence
  Description of Artificial Sequence: Synthetic oligonucleotide
  Target: COL7A1; (+) strand; PAM type: YTN; PAM sequence: TTC
tctccttggcggccagtggg

SEQ ID NO: 31284 - DNA, 20 bp, Artificial Sequence
  Description of Artificial Sequence: Synthetic oligonucleotide
  Target: COL7A1; (+) strand; PAM type: YTN; PAM sequence: CTC
tccttggcggccagtgggtc

SEQ ID NO: 31285 - DNA, 20 bp, Artificial Sequence
  Description of Artificial Sequence: Synthetic oligonucleotide
  Target: COL7A1; (+) strand; PAM type: YTN; PAM sequence: CTC
cttggcggccagtgggtcct

SEQ ID NO: 31286 - DNA, 20 bp, Artificial Sequence
  Description of Artificial Sequence: Synthetic oligonucleotide
  Target: COL7A1; (+) strand; PAM type: YTN; PAM sequence: CTT
ggcggccagtgggtcctggt

SEQ ID NO: 31287 - DNA, 20 bp, Artificial Sequence
  Description of Artificial Sequence: Synthetic oligonucleotide
  Target: COL7A1; (+) strand; PAM type: YTN; PAM sequence: TTG
gcggccagtgggtcctggtg

SEQ ID NO: 31288 - DNA, 20 bp, Artificial Sequence
  Description of Artificial Sequence: Synthetic oligonucleotide
  Target: COL7A1; (+) strand; PAM type: YTN; PAM sequence: CTG
gtggcccctgaatgtagaga

SEQ ID NO: 31289 - DNA, 20 bp, Artificial Sequence
  Description of Artificial Sequence: Synthetic oligonucleotide
  Target: COL7A1; (+) strand; PAM type: YTN; PAM sequence: CTG
aatgtagagaaagtgtgagc

SEQ ID NO: 31290 - DNA, 20 bp, Artificial Sequence
  Description of Artificial Sequence: Synthetic oligonucleotide
  Target: COL7A1; (+) strand; PAM type: YTN; PAM sequence: CTC
ctggtcccaccacagtcaca

SEQ ID NO: 31291 - DNA, 20 bp, Artificial Sequence
  Description of Artificial Sequence: Synthetic oligonucleotide
  Target: COL7A1; (+) strand; PAM type: YTN; PAM sequence: CTG
gtcccaccacagtcacagac

SEQ ID NO: 31292 - DNA, 20 bp, Artificial Sequence
  Description of Artificial Sequence: Synthetic oligonucleotide
  Target: COL7A1; (+) strand; PAM type: YTN; PAM sequence: CTC
acttcaggacccttggctcc

SEQ ID NO: 31293 - DNA, 20 bp, Artificial Sequence
  Description of Artificial Sequence: Synthetic oligonucleotide
  Target: COL7A1; (+) strand; PAM type: YTN; PAM sequence: CTT
caggacccttggctccagga

SEQ ID NO: 31294 - DNA, 20 bp, Artificial Sequence
  Description of Artificial Sequence: Synthetic oligonucleotide
  Target: COL7A1; (+) strand; PAM type: YTN; PAM sequence: TTC
aggacccttggctccaggac

SEQ ID NO: 31295 - DNA, 20 bp, Artificial Sequence
  Description of Artificial Sequence: Synthetic oligonucleotide
  Target: COL7A1; (+) strand; PAM type: YTN; PAM sequence: CTT
ggctccaggacgtccagcaa

SEQ ID NO: 31296 - DNA, 20 bp, Artificial Sequence
  Description of Artificial Sequence: Synthetic oligonucleotide
  Target: COL7A1; (+) strand; PAM type: YTN; PAM sequence: TTG
gctccaggacgtccagcaac

SEQ ID NO: 31297 - DNA, 20 bp, Artificial Sequence
  Description of Artificial Sequence: Synthetic oligonucleotide
  Target: COL7A1; (+) strand; PAM type: YTN; PAM sequence: CTC
caggacgtccagcaacccct

SEQ ID NO: 31298 - DNA, 20 bp, Artificial Sequence
  Description of Artificial Sequence: Synthetic oligonucleotide
  Target: COL7A1; (+) strand; PAM type: YTN; PAM sequence: CTG
gcagcccctggaggagagga

SEQ ID NO: 31299 - DNA, 20 bp, Artificial Sequence
  Description of Artificial Sequence: Synthetic oligonucleotide
  Target: COL7A1; (+) strand; PAM type: YTN; PAM sequence: CTG
gaggagaggaagggaagagc

SEQ ID NO: 31300 - DNA, 20 bp, Artificial Sequence
  Description of Artificial Sequence: Synthetic oligonucleotide
  Target: COL7A1; (+) strand; PAM type: YTN; PAM sequence: CTG
tgcaggtgggtggggacggg

SEQ ID NO: 31301 - DNA, 20 bp, Artificial Sequence
  Description of Artificial Sequence: Synthetic oligonucleotide
  Target: COL7A1; (+) strand; PAM type: YTN; PAM sequence: CTA
gaggctggggtgggggctgg

SEQ ID NO: 31302 - DNA, 20 bp, Artificial Sequence
  Description of Artificial Sequence: Synthetic oligonucleotide
  Target: COL7A1; (+) strand; PAM type: YTN; PAM sequence: CTG
gggtgggggctggagagggg

SEQ ID NO: 31303 - DNA, 20 bp, Artificial Sequence
  Description of Artificial Sequence: Synthetic oligonucleotide
  Target: COL7A1; (+) strand; PAM type: YTN; PAM sequence: CTG
gagaggggtcagggaagatt

SEQ ID NO: 31304 - DNA, 20 bp, Artificial Sequence
  Description of Artificial Sequence: Synthetic oligonucleotide
  Target: COL7A1; (+) strand; PAM type: YTN; PAM sequence: TTG
ggatttaggttggcaggggt

SEQ ID NO: 31305 - DNA, 20 bp, Artificial Sequence
  Description of Artificial Sequence: Synthetic oligonucleotide
  Target: COL7A1; (+) strand; PAM type: YTN; PAM sequence: TTT
aggttggcaggggtaagact

SEQ ID NO: 31306 - DNA, 20 bp, Artificial Sequence
  Description of Artificial Sequence: Synthetic oligonucleotide
  Target: COL7A1; (+) strand; PAM type: YTN; PAM sequence: TTA
ggttggcaggggtaagactt

SEQ ID NO: 31307 - DNA, 20 bp, Artificial Sequence
  Description of Artificial Sequence: Synthetic oligonucleotide
  Target: COL7A1; (+) strand; PAM type: YTN; PAM sequence: TTG
gcaggggtaagacttggcag

SEQ ID NO: 31308 - DNA, 20 bp, Artificial Sequence
  Description of Artificial Sequence: Synthetic oligonucleotide
  Target: COL7A1; (+) strand; PAM type: YTN; PAM sequence: CTT
ggcaggagaacagagaccag

SEQ ID NO: 31309 - DNA, 20 bp, Artificial Sequence
  Description of Artificial Sequence: Synthetic oligonucleotide
  Target: COL7A1; (+) strand; PAM type: YTN; PAM sequence: TTG
gcaggagaacagagaccagg

SEQ ID NO: 31310 - DNA, 20 bp, Artificial Sequence
  Description of Artificial Sequence: Synthetic oligonucleotide
  Target: COL7A1; (+) strand; PAM type: YTN; PAM sequence: TTC
agcagggtcagaggttcaaa

SEQ ID NO: 31311 - DNA, 20 bp, Artificial Sequence
  Description of Artificial Sequence: Synthetic oligonucleotide
  Target: COL7A1; (+) strand; PAM type: YTN; PAM sequence: TTC
aaagccaggtccctggggct

SEQ ID NO: 31312 - DNA, 20 bp, Artificial Sequence
  Description of Artificial Sequence: Synthetic oligonucleotide
  Target: COL7A1; (+) strand; PAM type: YTN; PAM sequence: CTG
gggctgagggttagagcctg

SEQ ID NO: 31313 - DNA, 20 bp, Artificial Sequence
  Description of Artificial Sequence: Synthetic oligonucleotide
  Target: COL7A1; (+) strand; PAM type: YTN; PAM sequence: CTG
agggttagagcctgtatcag

SEQ ID NO: 31314 - DNA, 20 bp, Artificial Sequence
  Description of Artificial Sequence: Synthetic oligonucleotide
  Target: COL7A1; (+) strand; PAM type: YTN; PAM sequence: TTA
gagcctgtatcagcagggat

SEQ ID NO: 31315 - DNA, 20 bp, Artificial Sequence
  Description of Artificial Sequence: Synthetic oligonucleotide
  Target: COL7A1; (+) strand; PAM type: YTN; PAM sequence: CTG
tatcagcagggataagtggt

SEQ ID NO: 31316 - DNA, 20 bp, Artificial Sequence
  Description of Artificial Sequence: Synthetic oligonucleotide
  Target: COL7A1; (+) strand; PAM type: YTN; PAM sequence: TTG
aggaggggtgaggagcaggg

SEQ ID NO: 31317 - DNA, 20 bp, Artificial Sequence
  Description of Artificial Sequence: Synthetic oligonucleotide
  Target: COL7A1; (+) strand; PAM type: YTN; PAM sequence: CTG
gtatgagcattgcagccagt

SEQ ID NO: 31318 - DNA, 20 bp, Artificial Sequence
  Description of Artificial Sequence: Synthetic oligonucleotide
  Target: COL7A1; (+) strand; PAM type: YTN; PAM sequence: TTG
cagccagtgggtttacccgg

SEQ ID NO: 31319 - DNA, 20 bp, Artificial Sequence
  Description of Artificial Sequence: Synthetic oligonucleotide
  Target: COL7A1; (+) strand; PAM type: YTN; PAM sequence: TTT
acccgggatcccgctgggcc

SEQ ID NO: 31320 - DNA, 20 bp, Artificial Sequence
  Description of Artificial Sequence: Synthetic oligonucleotide
  Target: COL7A1; (+) strand; PAM type: YTN; PAM sequence: TTA
cccgggatcccgctgggcct

SEQ ID NO: 31321 - DNA, 20 bp, Artificial Sequence
  Description of Artificial Sequence: Synthetic oligonucleotide
  Target: COL7A1; (+) strand; PAM type: YTN; PAM sequence: CTG
ggcctgggggtccacgttcg

SEQ ID NO: 31322 - DNA, 20 bp, Artificial Sequence
  Description of Artificial Sequence: Synthetic oligonucleotide
  Target: COL7A1; (+) strand; PAM type: YTN; PAM sequence: CTG
ggggtccacgttcgccctga

SEQ ID NO: 31323 - DNA, 20 bp, Artificial Sequence
  Description of Artificial Sequence: Synthetic oligonucleotide
  Target: COL7A1; (+) strand; PAM type: YTN; PAM sequence: TTC
gccctgatggaaaagaagag

SEQ ID NO: 31324 - DNA, 20 bp, Artificial Sequence
  Description of Artificial Sequence: Synthetic oligonucleotide
  Target: COL7A1; (+) strand; PAM type: YTN; PAM sequence: CTG
atggaaaagaagaggtcaga

SEQ ID NO: 31325 - DNA, 20 bp, Artificial Sequence
  Description of Artificial Sequence: Synthetic oligonucleotide
  Target: COL7A1; (+) strand; PAM type: YTN; PAM sequence: CTG
agttgggcccagatcctcca

SEQ ID NO: 31326 - DNA, 20 bp, Artificial Sequence
  Description of Artificial Sequence: Synthetic oligonucleotide
  Target: COL7A1; (+) strand; PAM type: YTN; PAM sequence: TTG
ggcccagatcctccagggcc

SEQ ID NO: 31327 - DNA, 20 bp, Artificial Sequence
  Description of Artificial Sequence: Synthetic oligonucleotide
  Target: COL7A1; (+) strand; PAM type: YTN; PAM sequence: CTC
cagggcccttggcacccccc

SEQ ID NO: 31328 - DNA, 20 bp, Artificial Sequence
  Description of Artificial Sequence: Synthetic oligonucleotide
  Target: COL7A1; (+) strand; PAM type: YTN; PAM sequence: CTT
ggcaccccccaggttgcact

SEQ ID NO: 31329 - DNA, 20 bp, Artificial Sequence
  Description of Artificial Sequence: Synthetic oligonucleotide
  Target: COL7A1; (+) strand; PAM type: YTN; PAM sequence: TTG
gcaccccccaggttgcactt

SEQ ID NO: 31330 - DNA, 20 bp, Artificial Sequence
  Description of Artificial Sequence: Synthetic oligonucleotide
  Target: COL7A1; (+) strand; PAM type: YTN; PAM sequence: TTG
cacttaccttctctccagcc

SEQ ID NO: 31331 - DNA, 20 bp, Artificial Sequence
  Description of Artificial Sequence: Synthetic oligonucleotide
  Target: COL7A1; (+) strand; PAM type: YTN; PAM sequence: CTT
accttctctccagcctcacc

SEQ ID NO: 31332 - DNA, 20 bp, Artificial Sequence
  Description of Artificial Sequence: Synthetic oligonucleotide
  Target: COL7A1; (+) strand; PAM type: YTN; PAM sequence: TTA
ccttctctccagcctcaccc

SEQ ID NO: 31333 - DNA, 20 bp, Artificial Sequence
  Description of Artificial Sequence: Synthetic oligonucleotide
  Target: COL7A1; (+) strand; PAM type: YTN; PAM sequence: CTT
ctctccagcctcacccaggg

SEQ ID NO: 31334 - DNA, 20 bp, Artificial Sequence
  Description of Artificial Sequence: Synthetic oligonucleotide
  Target: COL7A1; (+) strand; PAM type: YTN; PAM sequence: TTC
tctccagcctcacccagggg

SEQ ID NO: 31335 - DNA, 20 bp, Artificial Sequence
  Description of Artificial Sequence: Synthetic oligonucleotide
  Target: COL7A1; (+) strand; PAM type: YTN; PAM sequence: CTC
tccagcctcacccaggggcc

SEQ ID NO: 31336 - DNA, 20 bp, Artificial Sequence
  Description of Artificial Sequence: Synthetic oligonucleotide
  Target: COL7A1; (+) strand; PAM type: YTN; PAM sequence: CTC
cagcctcacccaggggccct

SEQ ID NO: 31337 - DNA, 20 bp, Artificial Sequence
  Description of Artificial Sequence: Synthetic oligonucleotide
  Target: COL7A1; (+) strand; PAM type: YTN; PAM sequence: CTC
acccaggggccctggaaagc

SEQ ID NO: 31338 - DNA, 20 bp, Artificial Sequence
  Description of Artificial Sequence: Synthetic oligonucleotide
  Target: COL7A1; (+) strand; PAM type: YTN; PAM sequence: CTG
gaaagccccggtcaccctga

SEQ ID NO: 31339 - DNA, 20 bp, Artificial Sequence
  Description of Artificial Sequence: Synthetic oligonucleotide
  Target: COL7A1; (+) strand; PAM type: YTN; PAM sequence: CTG
aagagagagggtgagagaaa

SEQ ID NO: 31340 - DNA, 20 bp, Artificial Sequence
  Description of Artificial Sequence: Synthetic oligonucleotide
  Target: COL7A1; (+) strand; PAM type: YTN; PAM sequence: TTG
gtggcggggcttgaacgtca

SEQ ID NO: 31341 - DNA, 20 bp, Artificial Sequence
  Description of Artificial Sequence: Synthetic oligonucleotide
  Target: COL7A1; (+) strand; PAM type: YTN; PAM sequence: CTT
gaacgtcaaaccccagacaa

SEQ ID NO: 31342 - DNA, 20 bp, Artificial Sequence
  Description of Artificial Sequence: Synthetic oligonucleotide
  Target: COL7A1; (+) strand; PAM type: YTN; PAM sequence: TTG
aacgtcaaaccccagacaag

SEQ ID NO: 31343 - DNA, 20 bp, Artificial Sequence
  Description of Artificial Sequence: Synthetic oligonucleotide
  Target: COL7A1; (+) strand; PAM type: YTN; PAM sequence: CTC
caaccaccccctccaaaacc

SEQ ID NO: 31344 - DNA, 20 bp, Artificial Sequence
  Description of Artificial Sequence: Synthetic oligonucleotide
  Target: COL7A1; (+) strand; PAM type: YTN; PAM sequence: CTC
caaaaccacgacctctgacc

SEQ ID NO: 31345 - DNA, 20 bp, Artificial Sequence
  Description of Artificial Sequence: Synthetic oligonucleotide
  Target: COL7A1; (+) strand; PAM type: YTN; PAM sequence: CTC
tgacctggagggaactctta

SEQ ID NO: 31346 - DNA, 20 bp, Artificial Sequence
  Description of Artificial Sequence: Synthetic oligonucleotide
  Target: COL7A1; (+) strand; PAM type: YTN; PAM sequence: CTG
acctggagggaactcttatc

SEQ ID NO: 31347 - DNA, 20 bp, Artificial Sequence
  Description of Artificial Sequence: Synthetic oligonucleotide
  Target: COL7A1; (+) strand; PAM type: YTN; PAM sequence: CTG
gagggaactcttatctcctt

SEQ ID NO: 31348 - DNA, 20 bp, Artificial Sequence
  Description of Artificial Sequence: Synthetic oligonucleotide
  Target: COL7A1; (+) strand; PAM type: YTN; PAM sequence: CTC
ttatctccttatcttccagc

SEQ ID NO: 31349 - DNA, 20 bp, Artificial Sequence
  Description of Artificial Sequence: Synthetic oligonucleotide
  Target: COL7A1; (+) strand; PAM type: YTN; PAM sequence: CTT
atctccttatcttccagcct

SEQ ID NO: 31350 - DNA, 20 bp, Artificial Sequence
  Description of Artificial Sequence: Synthetic oligonucleotide
  Target: COL7A1; (+) strand; PAM type: YTN; PAM sequence: TTA
tctccttatcttccagcctc

SEQ ID NO: 31351 - DNA, 20 bp, Artificial Sequence
  Description of Artificial Sequence: Synthetic oligonucleotide
  Target: COL7A1; (+) strand; PAM type: YTN; PAM sequence: CTC
cttatcttccagcctcccct

SEQ ID NO: 31352 - DNA, 20 bp, Artificial Sequence
  Description of Artificial Sequence: Synthetic oligonucleotide
  Target: COL7A1; (+) strand; PAM type: YTN; PAM sequence: CTT
atcttccagcctcccctaac

SEQ ID NO: 31353 - DNA, 20 bp, Artificial Sequence
  Description of Artificial Sequence: Synthetic oligonucleotide
  Target: COL7A1; (+) strand; PAM type: YTN; PAM sequence: TTA
tcttccagcctcccctaaca

SEQ ID NO: 31354 - DNA, 20 bp, Artificial Sequence
  Description of Artificial Sequence: Synthetic oligonucleotide
  Target: COL7A1; (+) strand; PAM type: YTN; PAM sequence: CTT
ccagcctcccctaacaccat

SEQ ID NO: 31355 - DNA, 20 bp, Artificial Sequence
  Description of Artificial Sequence: Synthetic oligonucleotide
  Target: COL7A1; (+) strand; PAM type: YTN; PAM sequence: TTC
cagcctcccctaacaccatg

SEQ ID NO: 31356 - DNA, 20 bp, Artificial Sequence
  Description of Artificial Sequence: Synthetic oligonucleotide
  Target: COL7A1; (+) strand; PAM type: YTN; PAM sequence: CTC
ccctaacaccatggggagcc

SEQ ID NO: 31357 - DNA, 20 bp, Artificial Sequence
  Description of Artificial Sequence: Synthetic oligonucleotide
  Target: COL7A1; (+) strand; PAM type: YTN; PAM sequence: CTA
acaccatggggagcccagag

SEQ ID NO: 31358 - DNA, 20 bp, Artificial Sequence
  Description of Artificial Sequence: Synthetic oligonucleotide
  Target: COL7A1; (+) strand; PAM type: YTN; PAM sequence: CTC
acacctgaatcccccaactg

SEQ ID NO: 31359 - DNA, 20 bp, Artificial Sequence
  Description of Artificial Sequence: Synthetic oligonucleotide
  Target: COL7A1; (+) strand; PAM type: YTN; PAM sequence: CTG
aatcccccaactggtactca

SEQ ID NO: 31360 - DNA, 20 bp, Artificial Sequence
  Description of Artificial Sequence: Synthetic oligonucleotide
  Target: COL7A1; (+) strand; PAM type: YTN; PAM sequence: CTG
gtactcactttggggccaat

SEQ ID NO: 31361 - DNA, 20 bp, Artificial Sequence
  Description of Artificial Sequence: Synthetic oligonucleotide
  Target: COL7A1; (+) strand; PAM type: YTN; PAM sequence: CTC
actttggggccaatagctcc

SEQ ID NO: 31362 - DNA, 20 bp, Artificial Sequence
  Description of Artificial Sequence: Synthetic oligonucleotide
  Target: COL7A1; (+) strand; PAM type: YTN; PAM sequence: CTT
tggggccaatagctccagga

SEQ ID NO: 31363 - DNA, 20 bp, Artificial Sequence
  Description of Artificial Sequence: Synthetic oligonucleotide
  Target: COL7A1; (+) strand; PAM type: YTN; PAM sequence: TTT
ggggccaatagctccaggag

SEQ ID NO: 31364 - DNA, 20 bp, Artificial Sequence
  Description of Artificial Sequence: Synthetic oligonucleotide
  Target: COL7A1; (+) strand; PAM type: YTN; PAM sequence: TTG
gggccaatagctccaggagg

SEQ ID NO: 31365 - DNA, 20 bp, Artificial Sequence
  Description of Artificial Sequence: Synthetic oligonucleotide
  Target: COL7A1; (+) strand; PAM type: YTN; PAM sequence: CTC
caggaggtccccgtgggccc

SEQ ID NO: 31366 - DNA, 20 bp, Artificial Sequence
  Description of Artificial Sequence: Synthetic oligonucleotide
  Target: COL7A1; (+) strand; PAM type: YTN; PAM sequence: CTG
gaagggatgaatttgggggt

SEQ ID NO: 31367 - DNA, 20 bp, Artificial Sequence
  Description of Artificial Sequence: Synthetic oligonucleotide
  Target: COL7A1; (+) strand; PAM type: YTN; PAM sequence: TTT
gggggttcagagatttgggt

SEQ ID NO: 31368 - DNA, 20 bp, Artificial Sequence
  Description of Artificial Sequence: Synthetic oligonucleotide
  Target: COL7A1; (+) strand; PAM type: YTN; PAM sequence: TTG
ggggttcagagatttgggtt

SEQ ID NO: 31369 - DNA, 20 bp, Artificial Sequence
  Description of Artificial Sequence: Synthetic oligonucleotide
  Target: COL7A1; (+) strand; PAM type: YTN; PAM sequence: TTC
agagatttgggtttgggcat

SEQ ID NO: 31370 - DNA, 20 bp, Artificial Sequence
  Description of Artificial Sequence: Synthetic oligonucleotide
  Target: COL7A1; (+) strand; PAM type: YTN; PAM sequence: TTT
gggtttgggcatgaggatgg

SEQ ID NO: 31371 - DNA, 20 bp, Artificial Sequence
  Description of Artificial Sequence: Synthetic oligonucleotide
  Target: COL7A1; (+) strand; PAM type: YTN; PAM sequence: TTG
ggtttgggcatgaggatgga

SEQ ID NO: 31372 - DNA, 20 bp, Artificial Sequence
  Description of Artificial Sequence: Synthetic oligonucleotide
  Target: COL7A1; (+) strand; PAM type: YTN; PAM sequence: TTT
gggcatgaggatggagcagt

SEQ ID NO: 31373 - DNA, 20 bp, Artificial Sequence
  Description of Artificial Sequence: Synthetic oligonucleotide
  Target: COL7A1; (+) strand; PAM type: YTN; PAM sequence: TTG
ggcatgaggatggagcagtg

SEQ ID NO: 31374 - DNA, 20 bp, Artificial Sequence
  Description of Artificial Sequence: Synthetic oligonucleotide
  Target: COL7A1; (+) strand; PAM type: YTN; PAM sequence: TTG
atgattgaggtaggggctgg

SEQ ID NO: 31375 - DNA, 20 bp, Artificial Sequence
  Description of Artificial Sequence: Synthetic oligonucleotide
  Target: COL7A1; (+) strand; PAM type: YTN; PAM sequence: TTG
aggtaggggctggagctgtg

SEQ ID NO: 31376 - DNA, 20 bp, Artificial Sequence
  Description of Artificial Sequence: Synthetic oligonucleotide
  Target: COL7A1; (+) strand; PAM type: YTN; PAM sequence: CTG
gagctgtgcccaccatattc

SEQ ID NO: 31377 - DNA, 20 bp, Artificial Sequence
  Description of Artificial Sequence: Synthetic oligonucleotide
  Target: COL7A1; (+) strand; PAM type: YTN; PAM sequence: CTG
tgcccaccatattcagaatc

SEQ ID NO: 31378 - DNA, 20 bp, Artificial Sequence
  Description of Artificial Sequence: Synthetic oligonucleotide
  Target: COL7A1; (+) strand; PAM type: YTN; PAM sequence: TTC
agaatccctggcccctccac

SEQ ID NO: 31379 - DNA, 20 bp, Artificial Sequence
  Description of Artificial Sequence: Synthetic oligonucleotide
  Target: COL7A1; (+) strand; PAM type: YTN; PAM sequence: CTG
gcccctccactcacctgctc

SEQ ID NO: 31380 - DNA, 20 bp, Artificial Sequence
  Description of Artificial Sequence: Synthetic oligonucleotide
  Target: COL7A1; (+) strand; PAM type: YTN; PAM sequence: CTC
cactcacctgctcacccgga

SEQ ID NO: 31381 - DNA, 20 bp, Artificial Sequence
  Description of Artificial Sequence: Synthetic oligonucleotide
  Target: COL7A1; (+) strand; PAM type: YTN; PAM sequence: CTC
acctgctcacccggagaccc

SEQ ID NO: 31382 - DNA, 20 bp, Artificial Sequence
  Description of Artificial Sequence: Synthetic oligonucleotide
  Target: COL7A1; (+) strand; PAM type: YTN; PAM sequence: CTG
ctcacccggagacccaggtt

SEQ ID NO: 31383 - DNA, 20 bp, Artificial Sequence
  Description of Artificial Sequence: Synthetic oligonucleotide
  Target: COL7A1; (+) strand; PAM type: YTN; PAM sequence: CTC
acccggagacccaggttgtc

SEQ ID NO: 31384 - DNA, 20 bp, Artificial Sequence
  Description of Artificial Sequence: Synthetic oligonucleotide
  Target: COL7A1; (+) strand; PAM type: YTN; PAM sequence: TTG
tcctgggaggcctggagctc

SEQ ID NO: 31385 - DNA, 20 bp, Artificial Sequence
  Description of Artificial Sequence: Synthetic oligonucleotide
  Target: COL7A1; (+) strand; PAM type: YTN; PAM sequence: CTG
ggaggcctggagctccatcc

SEQ ID NO: 31386 - DNA, 20 bp, Artificial Sequence
  Description of Artificial Sequence: Synthetic oligonucleotide
  Target: COL7A1; (+) strand; PAM type: YTN; PAM sequence: CTG
gagctccatcctcagagtca

SEQ ID NO: 31387 - DNA, 20 bp, Artificial Sequence
  Description of Artificial Sequence: Synthetic oligonucleotide
  Target: COL7A1; (+) strand; PAM type: YTN; PAM sequence: CTC
catcctcagagtcaccctga

SEQ ID NO: 31388 - DNA, 20 bp, Artificial Sequence
  Description of Artificial Sequence: Synthetic oligonucleotide
  Target: COL7A1; (+) strand; PAM type: YTN; PAM sequence: CTC
agagtcaccctgaaggagaa

SEQ ID NO: 31389 - DNA, 20 bp, Artificial Sequence
  Description of Artificial Sequence: Synthetic oligonucleotide
  Target: COL7A1; (+) strand; PAM type: YTN; PAM sequence: CTG
aaggagaaacacacgggtgg

SEQ ID NO: 31390 - DNA, 20 bp, Artificial Sequence
  Description of Artificial Sequence: Synthetic oligonucleotide
  Target: COL7A1; (+) strand; PAM type: YTN; PAM sequence: CTG
cccccagcacgcagcctccc

SEQ ID NO: 31391 - DNA, 20 bp, Artificial Sequence
  Description of Artificial Sequence: Synthetic oligonucleotide
  Target: COL7A1; (+) strand; PAM type: YTN; PAM sequence: CTC
ccaccccagaactgggacat

SEQ ID NO: 31392 - DNA, 20 bp, Artificial Sequence
  Description of Artificial Sequence: Synthetic oligonucleotide
  Target: COL7A1; (+) strand; PAM type: YTN; PAM sequence: CTG
ggacatcatcaagtcagcct

SEQ ID NO: 31393 - DNA, 20 bp, Artificial Sequence
  Description of Artificial Sequence: Synthetic oligonucleotide
  Target: COL7A1; (+) strand; PAM type: YTN; PAM sequence: CTT
cctactttttctcctttctt

SEQ ID NO: 31394 - DNA, 20 bp, Artificial Sequence
  Description of Artificial Sequence: Synthetic oligonucleotide
  Target: COL7A1; (+) strand; PAM type: YTN; PAM sequence: TTC
ctactttttctcctttcttt

SEQ ID NO: 31395 - DNA, 20 bp, Artificial Sequence
  Description of Artificial Sequence: Synthetic oligonucleotide
  Target: COL7A1; (+) strand; PAM type: YTN; PAM sequence: CTA
ctttttctcctttctttcca

SEQ ID NO: 31396 - DNA, 20 bp, Artificial Sequence
  Description of Artificial Sequence: Synthetic oligonucleotide
  Target: COL7A1; (+) strand; PAM type: YTN; PAM sequence: CTT
tttctcctttctttccaggg

SEQ ID NO: 31397 - DNA, 20 bp, Artificial Sequence
  Description of Artificial Sequence: Synthetic oligonucleotide
  Target: COL7A1; (+) strand; PAM type: YTN; PAM sequence: TTT
ttctcctttctttccagggg

SEQ ID NO: 31398 - DNA, 20 bp, Artificial Sequence
  Description of Artificial Sequence: Synthetic oligonucleotide
  Target: COL7A1; (+) strand; PAM type: YTN; PAM sequence: TTT
tctcctttctttccaggggg

SEQ ID NO: 31399 - DNA, 20 bp, Artificial Sequence
  Description of Artificial Sequence: Synthetic oligonucleotide
  Target: COL7A1; (+) strand; PAM type: YTN; PAM sequence: TTT
ctcctttctttccagggggg

SEQ ID NO: 31400 - DNA, 20 bp, Artificial Sequence
  Description of Artificial Sequence: Synthetic oligonucleotide
  Target: COL7A1; (+) strand; PAM type: YTN; PAM sequence: TTC
tcctttctttccaggggggc

SEQ ID NO: 31401 - DNA, 20 bp, Artificial Sequence
  Description of Artificial Sequence: Synthetic oligonucleotide
  Target: COL7A1; (+) strand; PAM type: YTN; PAM sequence: CTC
ctttctttccaggggggcca

SEQ ID NO: 31402 - DNA, 20 bp, Artificial Sequence
  Description of Artificial Sequence: Synthetic oligonucleotide
  Target: COL7A1; (+) strand; PAM type: YTN; PAM sequence: CTT
tctttccaggggggccaacg

SEQ ID NO: 31403 - DNA, 20 bp, Artificial Sequence
  Description of Artificial Sequence: Synthetic oligonucleotide
  Target: COL7A1; (+) strand; PAM type: YTN; PAM sequence: TTT
ctttccaggggggccaacgg

SEQ ID NO: 31404 - DNA, 20 bp, Artificial Sequence
  Description of Artificial Sequence: Synthetic oligonucleotide
  Target: COL7A1; (+) strand; PAM type: YTN; PAM sequence: TTC
tttccaggggggccaacggg

SEQ ID NO: 31405 - DNA, 20 bp, Artificial Sequence
  Description of Artificial Sequence: Synthetic oligonucleotide
  Target: COL7A1; (+) strand; PAM type: YTN; PAM sequence: CTT
tccaggggggccaacggggc

SEQ ID NO: 31406 - DNA, 20 bp, Artificial Sequence
  Description of Artificial Sequence: Synthetic oligonucleotide
  Target: COL7A1; (+) strand; PAM type: YTN; PAM sequence: TTT
ccaggggggccaacggggcc

SEQ ID NO: 31407 - DNA, 20 bp, Artificial Sequence
  Description of Artificial Sequence: Synthetic oligonucleotide
  Target: COL7A1; (+) strand; PAM type: YTN; PAM sequence: TTC
caggggggccaacggggcct

SEQ ID NO: 31408 - DNA, 20 bp, Artificial Sequence
  Description of Artificial Sequence: Synthetic oligonucleotide
  Target: COL7A1; (+) strand; PAM type: YTN; PAM sequence: CTT
ggggtccagggcttccggga

SEQ ID NO: 31409 - DNA, 20 bp, Artificial Sequence
  Description of Artificial Sequence: Synthetic oligonucleotide
  Target: COL7A1; (+) strand; PAM type: YTN; PAM sequence: TTG
gggtccagggcttccgggaa

SEQ ID NO: 31410 - DNA, 20 bp, Artificial Sequence
  Description of Artificial Sequence: Synthetic oligonucleotide
  Target: COL7A1; (+) strand; PAM type: YTN; PAM sequence: CTT
ccgggaagaccctaggaaga

SEQ ID NO: 31411 - DNA, 20 bp, Artificial Sequence
  Description of Artificial Sequence: Synthetic oligonucleotide
  Target: COL7A1; (+) strand; PAM type: YTN; PAM sequence: TTC
cgggaagaccctaggaagaa

SEQ ID NO: 31412 - DNA, 20 bp, Artificial Sequence
  Description of Artificial Sequence: Synthetic oligonucleotide
  Target: COL7A1; (+) strand; PAM type: YTN; PAM sequence: CTA
ggaagaagtgagtaaaaata

SEQ ID NO: 31413 - DNA, 20 bp, Artificial Sequence
  Description of Artificial Sequence: Synthetic oligonucleotide
  Target: COL7A1; (+) strand; PAM type: YTN; PAM sequence: CTA
tgaagcccagcacccaacca

SEQ ID NO: 31414 - DNA, 20 bp, Artificial Sequence
  Description of Artificial Sequence: Synthetic oligonucleotide
  Target: COL7A1; (+) strand; PAM type: YTN; PAM sequence: CTG
ccccaggagagacccacacc

SEQ ID NO: 31415 - DNA, 20 bp, Artificial Sequence
  Description of Artificial Sequence: Synthetic oligonucleotide
  Target: COL7A1; (+) strand; PAM type: YTN; PAM sequence: CTG
agcagggcccccagcagagc

SEQ ID NO: 31416 - DNA, 20 bp, Artificial Sequence
  Description of Artificial Sequence: Synthetic oligonucleotide
  Target: COL7A1; (+) strand; PAM type: YTN; PAM sequence: CTC
aaggcccctcaccggcagcc

SEQ ID NO: 31417 - DNA, 20 bp, Artificial Sequence
  Description of Artificial Sequence: Synthetic oligonucleotide
  Target: COL7A1; (+) strand; PAM type: YTN; PAM sequence: CTC
accggcagcccaggctcccc

SEQ ID NO: 31418 - DNA, 20 bp, Artificial Sequence
  Description of Artificial Sequence: Synthetic oligonucleotide
  Target: COL7A1; (+) strand; PAM type: YTN; PAM sequence: CTC
cccaggagcaatgccacctt

SEQ ID NO: 31419 - DNA, 20 bp, Artificial Sequence
  Description of Artificial Sequence: Synthetic oligonucleotide
  Target: COL7A1; (+) strand; PAM type: YTN; PAM sequence: CTT
cacctggtccagggggaccc

SEQ ID NO: 31420 - DNA, 20 bp, Artificial Sequence
  Description of Artificial Sequence: Synthetic oligonucleotide
  Target: COL7A1; (+) strand; PAM type: YTN; PAM sequence: TTC
acctggtccagggggaccct

SEQ ID NO: 31421 - DNA, 20 bp, Artificial Sequence
  Description of Artificial Sequence: Synthetic oligonucleotide
  Target: COL7A1; (+) strand; PAM type: YTN; PAM sequence: CTG
gtccagggggaccctgggag

SEQ ID NO: 31422 - DNA, 20 bp, Artificial Sequence
  Description of Artificial Sequence: Synthetic oligonucleotide
  Target: COL7A1; (+) strand; PAM type: YTN; PAM sequence: CTG
ggagagaacagcaggtcagg

SEQ ID NO: 31423 - DNA, 20 bp, Artificial Sequence
  Description of Artificial Sequence: Synthetic oligonucleotide
  Target: COL7A1; (+) strand; PAM type: YTN; PAM sequence: CTC
caagccacccctagcacaac

SEQ ID NO: 31424 - DNA, 20 bp, Artificial Sequence
  Description of Artificial Sequence: Synthetic oligonucleotide
  Target: COL7A1; (+) strand; PAM type: YTN; PAM sequence: CTA
gcacaacctgtccctcactt

SEQ ID NO: 31425 - DNA, 20 bp, Artificial Sequence
  Description of Artificial Sequence: Synthetic oligonucleotide
  Target: COL7A1; (+) strand; PAM type: YTN; PAM sequence: CTG
tccctcacttacccgctccc

SEQ ID NO: 31426 - DNA, 20 bp, Artificial Sequence
  Description of Artificial Sequence: Synthetic oligonucleotide
  Target: COL7A1; (+) strand; PAM type: YTN; PAM sequence: CTC
acttacccgctccccacgat

SEQ ID NO: 31427 - DNA, 20 bp, Artificial Sequence
  Description of Artificial Sequence: Synthetic oligonucleotide
  Target: COL7A1; (+) strand; PAM type: YTN; PAM sequence: CTT
acccgctccccacgatcgcc

SEQ ID NO: 31428 - DNA, 20 bp, Artificial Sequence
  Description of Artificial Sequence: Synthetic oligonucleotide
  Target: COL7A1; (+) strand; PAM type: YTN; PAM sequence: TTA
cccgctccccacgatcgcct

SEQ ID NO: 31429 - DNA, 20 bp, Artificial Sequence
  Description of Artificial Sequence: Synthetic oligonucleotide
  Target: COL7A1; (+) strand; PAM type: YTN; PAM sequence: CTC
cccacgatcgcctttgtcac

SEQ ID NO: 31430 - DNA, 20 bp, Artificial Sequence
  Description of Artificial Sequence: Synthetic oligonucleotide
  Target: COL7A1; (+) strand; PAM type: YTN; PAM sequence: CTT
tgtcaccctagaaaacagat

SEQ ID NO: 31431 - DNA, 20 bp, Artificial Sequence
  Description of Artificial Sequence: Synthetic oligonucleotide
  Target: COL7A1; (+) strand; PAM type: YTN; PAM sequence: TTT
gtcaccctagaaaacagatg

SEQ ID NO: 31432 - DNA, 20 bp, Artificial Sequence
  Description of Artificial Sequence: Synthetic oligonucleotide
  Target: COL7A1; (+) strand; PAM type: YTN; PAM sequence: TTG
tcaccctagaaaacagatga

SEQ ID NO: 31433 - DNA, 20 bp, Artificial Sequence
  Description of Artificial Sequence: Synthetic oligonucleotide
  Target: COL7A1; (+) strand; PAM type: YTN; PAM sequence: CTA
gaaaacagatgacgacccca

SEQ ID NO: 31434 - DNA, 20 bp, Artificial Sequence
  Description of Artificial Sequence: Synthetic oligonucleotide
  Target: COL7A1; (+) strand; PAM type: YTN; PAM sequence: CTG
ggccacacctcactcccaaa

SEQ ID NO: 31435 - DNA, 20 bp, Artificial Sequence
  Description of Artificial Sequence: Synthetic oligonucleotide
  Target: COL7A1; (+) strand; PAM type: YTN; PAM sequence: CTC
actcccaaagataccaggag

SEQ ID NO: 31436 - DNA, 20 bp, Artificial Sequence
  Description of Artificial Sequence: Synthetic oligonucleotide
  Target: COL7A1; (+) strand; PAM type: YTN; PAM sequence: CTC
ccaaagataccaggagtgat

SEQ ID NO: 31437 - DNA, 20 bp, Artificial Sequence
  Description of Artificial Sequence: Synthetic oligonucleotide
  Target: COL7A1; (+) strand; PAM type: YTN; PAM sequence: TTG
gatttcaaggattttgggag

SEQ ID NO: 31438 - DNA, 20 bp, Artificial Sequence
  Description of Artificial Sequence: Synthetic oligonucleotide
  Target: COL7A1; (+) strand; PAM type: YTN; PAM sequence: TTT
caaggattttgggagaactg

SEQ ID NO: 31439 - DNA, 20 bp, Artificial Sequence
  Description of Artificial Sequence: Synthetic oligonucleotide
  Target: COL7A1; (+) strand; PAM type: YTN; PAM sequence: TTC
aaggattttgggagaactga

SEQ ID NO: 31440 - DNA, 20 bp, Artificial Sequence
  Description of Artificial Sequence: Synthetic oligonucleotide
  Target: COL7A1; (+) strand; PAM type: YTN; PAM sequence: TTT
tgggagaactgaggcgtcat

SEQ ID NO: 31441 - DNA, 20 bp, Artificial Sequence
  Description of Artificial Sequence: Synthetic oligonucleotide
  Target: COL7A1; (+) strand; PAM type: YTN; PAM sequence: TTT
gggagaactgaggcgtcatg

SEQ ID NO: 31442 - DNA, 20 bp, Artificial Sequence
  Description of Artificial Sequence: Synthetic oligonucleotide
  Target: COL7A1; (+) strand; PAM type: YTN; PAM sequence: TTG
ggagaactgaggcgtcatgg

SEQ ID NO: 31443 - DNA, 20 bp, Artificial Sequence
  Description of Artificial Sequence: Synthetic oligonucleotide
  Target: COL7A1; (+) strand; PAM type: YTN; PAM sequence: CTG
aggcgtcatggtgaggatgg

SEQ ID NO: 31444 - DNA, 20 bp, Artificial Sequence
  Description of Artificial Sequence: Synthetic oligonucleotide
  Target: COL7A1; (+) strand; PAM type: YTN; PAM sequence: CTG
gcaggggttatgtgggttca

SEQ ID NO: 31445 - DNA, 20 bp, Artificial Sequence
  Description of Artificial Sequence: Synthetic oligonucleotide
  Target: COL7A1; (+) strand; PAM type: YTN; PAM sequence: TTA
tgtgggttcaaatggggtca

SEQ ID NO: 31446 - DNA, 20 bp, Artificial Sequence
  Description of Artificial Sequence: Synthetic oligonucleotide
  Target: COL7A1; (+) strand; PAM type: YTN; PAM sequence: TTC
aaatggggtcaccaggtctc

SEQ ID NO: 31447 - DNA, 20 bp, Artificial Sequence
  Description of Artificial Sequence: Synthetic oligonucleotide
  Target: COL7A1; (+) strand; PAM type: YTN; PAM sequence: CTC
tgcatcacatggcactcatg

SEQ ID NO: 31448 - DNA, 20 bp, Artificial Sequence
  Description of Artificial Sequence: Synthetic oligonucleotide
  Target: COL7A1; (+) strand; PAM type: YTN; PAM sequence: CTG
catcacatggcactcatgag

SEQ ID NO: 31449 - DNA, 20 bp, Artificial Sequence
  Description of Artificial Sequence: Synthetic oligonucleotide
  Target: COL7A1; (+) strand; PAM type: YTN; PAM sequence: CTC
atgaggctgtcaccttcatg

SEQ ID NO: 31450 - DNA, 20 bp, Artificial Sequence
  Description of Artificial Sequence: Synthetic oligonucleotide
  Target: COL7A1; (+) strand; PAM type: YTN; PAM sequence: CTG
tcaccttcatggctgttcca

SEQ ID NO: 31451 - DNA, 20 bp, Artificial Sequence
  Description of Artificial Sequence: Synthetic oligonucleotide
  Target: COL7A1; (+) strand; PAM type: YTN; PAM sequence: CTT
catggctgttccaggaagcc

SEQ ID NO: 31452 - DNA, 20 bp, Artificial Sequence
  Description of Artificial Sequence: Synthetic oligonucleotide
  Target: COL7A1; (+) strand; PAM type: YTN; PAM sequence: TTC
atggctgttccaggaagccc

SEQ ID NO: 31453 - DNA, 20 bp, Artificial Sequence
  Description of Artificial Sequence: Synthetic oligonucleotide
  Target: COL7A1; (+) strand; PAM type: YTN; PAM sequence: CTG
ttccaggaagccctgggggg

SEQ ID NO: 31454 - DNA, 20 bp, Artificial Sequence
  Description of Artificial Sequence: Synthetic oligonucleotide
  Target: COL7A1; (+) strand; PAM type: YTN; PAM sequence: TTC
caggaagccctggggggcca

SEQ ID NO: 31455 - DNA, 20 bp, Artificial Sequence
  Description of Artificial Sequence: Synthetic oligonucleotide
  Target: COL7A1; (+) strand; PAM type: YTN; PAM sequence: CTG
gggggccacggggtcctggg

SEQ ID NO: 31456 - DNA, 20 bp, Artificial Sequence
  Description of Artificial Sequence: Synthetic oligonucleotide
  Target: COL7A1; (+) strand; PAM type: YTN; PAM sequence: CTG
ggtcccccagtggtccacga

SEQ ID NO: 31457 - DNA, 20 bp, Artificial Sequence
  Description of Artificial Sequence: Synthetic oligonucleotide
  Target: COL7A1; (+) strand; PAM type: YTN; PAM sequence: CTG
atggaggagacaaagtataa

SEQ ID NO: 31458 - DNA, 20 bp, Artificial Sequence
  Description of Artificial Sequence: Synthetic oligonucleotide
  Target: COL7A1; (+) strand; PAM type: YTN; PAM sequence: CTC
actctcgcccccctcgtgtt

SEQ ID NO: 31459 - DNA, 20 bp, Artificial Sequence
  Description of Artificial Sequence: Synthetic oligonucleotide
  Target: COL7A1; (+) strand; PAM type: YTN; PAM sequence: CTC
tcgcccccctcgtgttggtc

SEQ ID NO: 31460 - DNA, 20 bp, Artificial Sequence
  Description of Artificial Sequence: Synthetic oligonucleotide
  Target: COL7A1; (+) strand; PAM type: YTN; PAM sequence: CTC
gcccccctcgtgttggtccc

SEQ ID NO: 31461 - DNA, 20 bp, Artificial Sequence
  Description of Artificial Sequence: Synthetic oligonucleotide
  Target: COL7A1; (+) strand; PAM type: YTN; PAM sequence: CTC
gtgttggtccccccactaca

SEQ ID NO: 31462 - DNA, 20 bp, Artificial Sequence
  Description of Artificial Sequence: Synthetic oligonucleotide
  Target: COL7A1; (+) strand; PAM type: YTN; PAM sequence: TTG
gtccccccactacacatcac

SEQ ID NO: 31463 - DNA, 20 bp, Artificial Sequence
  Description of Artificial Sequence: Synthetic oligonucleotide
  Target: COL7A1; (+) strand; PAM type: YTN; PAM sequence: CTA
cacatcacttgcctccacat

SEQ ID NO: 31464 - DNA, 20 bp, Artificial Sequence
  Description of Artificial Sequence: Synthetic oligonucleotide
  Target: COL7A1; (+) strand; PAM type: YTN; PAM sequence: CTT
gcctccacataccctgcact

SEQ ID NO: 31465 - DNA, 20 bp, Artificial Sequence
  Description of Artificial Sequence: Synthetic oligonucleotide
  Target: COL7A1; (+) strand; PAM type: YTN; PAM sequence: TTG
cctccacataccctgcactt

SEQ ID NO: 31466 - DNA, 20 bp, Artificial Sequence
  Description of Artificial Sequence: Synthetic oligonucleotide
  Target: COL7A1; (+) strand; PAM type: YTN; PAM sequence: CTC
cacataccctgcacttaccg

SEQ ID NO: 31467 - DNA, 20 bp, Artificial Sequence
  Description of Artificial Sequence: Synthetic oligonucleotide
  Target: COL7A1; (+) strand; PAM type: YTN; PAM sequence: CTG
cacttaccgatggtccaggg

SEQ ID NO: 31468 - DNA, 20 bp, Artificial Sequence
  Description of Artificial Sequence: Synthetic oligonucleotide
  Target: COL7A1; (+) strand; PAM type: YTN; PAM sequence: CTT
accgatggtccagggtcccc

SEQ ID NO: 31469 - DNA, 20 bp, Artificial Sequence
  Description of Artificial Sequence: Synthetic oligonucleotide
  Target: COL7A1; (+) strand; PAM type: YTN; PAM sequence: TTA
ccgatggtccagggtcccct

SEQ ID NO: 31470 - DNA, 20 bp, Artificial Sequence
  Description of Artificial Sequence: Synthetic oligonucleotide
  Target: COL7A1; (+) strand; PAM type: YTN; PAM sequence: CTT
tccgcccaggaagcccaggt

SEQ ID NO: 31471 - DNA, 20 bp, Artificial Sequence
  Description of Artificial Sequence: Synthetic oligonucleotide
  Target: COL7A1; (+) strand; PAM type: YTN; PAM sequence: TTT
ccgcccaggaagcccaggtc

SEQ ID NO: 31472 - DNA, 20 bp, Artificial Sequence
  Description of Artificial Sequence: Synthetic oligonucleotide
  Target: COL7A1; (+) strand; PAM type: YTN; PAM sequence: TTC
cgcccaggaagcccaggtcc

SEQ ID NO: 31473 - DNA, 20 bp, Artificial Sequence
  Description of Artificial Sequence: Synthetic oligonucleotide
  Target: COL7A1; (+) strand; PAM type: YTN; PAM sequence: CTT
cacctccgatgacttgtccg

SEQ ID NO: 31474 - DNA, 20 bp, Artificial Sequence
  Description of Artificial Sequence: Synthetic oligonucleotide
  Target: COL7A1; (+) strand; PAM type: YTN; PAM sequence: TTC
acctccgatgacttgtccgg

SEQ ID NO: 31475 - DNA, 20 bp, Artificial Sequence
  Description of Artificial Sequence: Synthetic oligonucleotide
  Target: COL7A1; (+) strand; PAM type: YTN; PAM sequence: CTC
cgatgacttgtccgggagcc

SEQ ID NO: 31476 - DNA, 20 bp, Artificial Sequence
  Description of Artificial Sequence: Synthetic oligonucleotide
  Target: COL7A1; (+) strand; PAM type: YTN; PAM sequence: CTT
gtccgggagccccctgtaag

SEQ ID NO: 31477 - DNA, 20 bp, Artificial Sequence
  Description of Artificial Sequence: Synthetic oligonucleotide
  Target: COL7A1; (+) strand; PAM type: YTN; PAM sequence: TTG
tccgggagccccctgtaagg

SEQ ID NO: 31478 - DNA, 20 bp, Artificial Sequence
  Description of Artificial Sequence: Synthetic oligonucleotide
  Target: COL7A1; (+) strand; PAM type: YTN; PAM sequence: CTG
taaggacagagagcagtggg

SEQ ID NO: 31479 - DNA, 20 bp, Artificial Sequence
  Description of Artificial Sequence: Synthetic oligonucleotide
  Target: COL7A1; (+) strand; PAM type: YTN; PAM sequence: TTC
aggctatgggggccttgagc

SEQ ID NO: 31480 - DNA, 20 bp, Artificial Sequence
  Description of Artificial Sequence: Synthetic oligonucleotide
  Target: COL7A1; (+) strand; PAM type: YTN; PAM sequence: CTA
tgggggccttgagctggaag

SEQ ID NO: 31481 - DNA, 20 bp, Artificial Sequence
  Description of Artificial Sequence: Synthetic oligonucleotide
  Target: COL7A1; (+) strand; PAM type: YTN; PAM sequence: CTT
gagctggaagaagcccctag

SEQ ID NO: 31482 - DNA, 20 bp, Artificial Sequence
  Description of Artificial Sequence: Synthetic oligonucleotide
  Target: COL7A1; (+) strand; PAM type: YTN; PAM sequence: TTG
agctggaagaagcccctaga

SEQ ID NO: 31483 - DNA, 20 bp, Artificial Sequence
  Description of Artificial Sequence: Synthetic oligonucleotide
  Target: COL7A1; (+) strand; PAM type: YTN; PAM sequence: CTG
gaagaagcccctagacatgt

SEQ ID NO: 31484 - DNA, 20 bp, Artificial Sequence
  Description of Artificial Sequence: Synthetic oligonucleotide
  Target: COL7A1; (+) strand; PAM type: YTN; PAM sequence: CTA
gacatgtccagctattccta

SEQ ID NO: 31485 - DNA, 20 bp, Artificial Sequence
  Description of Artificial Sequence: Synthetic oligonucleotide
  Target: COL7A1; (+) strand; PAM type: YTN; PAM sequence: CTA
ttcctattcgcgccttaggc

SEQ ID NO: 31486 - DNA, 20 bp, Artificial Sequence
  Description of Artificial Sequence: Synthetic oligonucleotide
  Target: COL7A1; (+) strand; PAM type: YTN; PAM sequence: TTC
ctattcgcgccttaggccct

SEQ ID NO: 31487 - DNA, 20 bp, Artificial Sequence
  Description of Artificial Sequence: Synthetic oligonucleotide
  Target: COL7A1; (+) strand; PAM type: YTN; PAM sequence: CTA
ttcgcgccttaggccctgca

SEQ ID NO: 31488 - DNA, 20 bp, Artificial Sequence
  Description of Artificial Sequence: Synthetic oligonucleotide
  Target: COL7A1; (+) strand; PAM type: YTN; PAM sequence: TTC
gcgccttaggccctgcacag

SEQ ID NO: 31489 - DNA, 20 bp, Artificial Sequence
  Description of Artificial Sequence: Synthetic oligonucleotide
  Target: COL7A1; (+) strand; PAM type: YTN; PAM sequence: CTT
aggccctgcacagggtctgg

SEQ ID NO: 31490 - DNA, 20 bp, Artificial Sequence
  Description of Artificial Sequence: Synthetic oligonucleotide
  Target: COL7A1; (+) strand; PAM type: YTN; PAM sequence: TTA
ggccctgcacagggtctggt

SEQ ID NO: 31491 - DNA, 20 bp, Artificial Sequence
  Description of Artificial Sequence: Synthetic oligonucleotide
  Target: COL7A1; (+) strand; PAM type: YTN; PAM sequence: CTG
cacagggtctggtgtggggc

SEQ ID NO: 31492 - DNA, 20 bp, Artificial Sequence
  Description of Artificial Sequence: Synthetic oligonucleotide
  Target: COL7A1; (+) strand; PAM type: YTN; PAM sequence: CTG
gtgtggggcagtcctgctcc

SEQ ID NO: 31493 - DNA, 20 bp, Artificial Sequence
  Description of Artificial Sequence: Synthetic oligonucleotide
  Target: COL7A1; (+) strand; PAM type: YTN; PAM sequence: CTG
ctcctccctgggacatcccg

SEQ ID NO: 31494 - DNA, 20 bp, Artificial Sequence
  Description of Artificial Sequence: Synthetic oligonucleotide
  Target: COL7A1; (+) strand; PAM type: YTN; PAM sequence: CTC
ctccctgggacatcccggcc

SEQ ID NO: 31495 - DNA, 20 bp, Artificial Sequence
  Description of Artificial Sequence: Synthetic oligonucleotide
  Target: COL7A1; (+) strand; PAM type: YTN; PAM sequence: CTC
cctgggacatcccggccgcc

SEQ ID NO: 31496 - DNA, 20 bp, Artificial Sequence
  Description of Artificial Sequence: Synthetic oligonucleotide
  Target: COL7A1; (+) strand; PAM type: YTN; PAM sequence: CTG
ggacatcccggccgcctccc

SEQ ID NO: 31497 - DNA, 20 bp, Artificial Sequence
  Description of Artificial Sequence: Synthetic oligonucleotide
  Target: COL7A1; (+) strand; PAM type: YTN; PAM sequence: CTC
ccttcccccttcacctaccg

SEQ ID NO: 31498 - DNA, 20 bp, Artificial Sequence
  Description of Artificial Sequence: Synthetic oligonucleotide
  Target: COL7A1; (+) strand; PAM type: YTN; PAM sequence: CTT
cccccttcacctaccggctc

SEQ ID NO: 31499 - DNA, 20 bp, Artificial Sequence
  Description of Artificial Sequence: Synthetic oligonucleotide
  Target: COL7A1; (+) strand; PAM type: YTN; PAM sequence: TTC
ccccttcacctaccggctcc

SEQ ID NO: 31500 - DNA, 20 bp, Artificial Sequence
  Description of Artificial Sequence: Synthetic oligonucleotide
  Target: COL7A1; (+) strand; PAM type: YTN; PAM sequence: CTT
cacctaccggctcccccttt

SEQ ID NO: 31501 - DNA, 20 bp, Artificial Sequence
  Description of Artificial Sequence: Synthetic oligonucleotide
  Target: COL7A1; (+) strand; PAM type: YTN; PAM sequence: TTC
acctaccggctccccctttg

SEQ ID NO: 31502 - DNA, 20 bp, Artificial Sequence
  Description of Artificial Sequence: Synthetic oligonucleotide
  Target: COL7A1; (+) strand; PAM type: YTN; PAM sequence: CTA
ccggctccccctttgggcct

SEQ ID NO: 31503 - DNA, 20 bp, Artificial Sequence
  Description of Artificial Sequence: Synthetic oligonucleotide
  Target: COL7A1; (+) strand; PAM type: YTN; PAM sequence: CTC
cccctttgggcctcgaggtc

SEQ ID NO: 31504 - DNA, 20 bp, Artificial Sequence
  Description of Artificial Sequence: Synthetic oligonucleotide
  Target: COL7A1; (+) strand; PAM type: YTN; PAM sequence: CTT
tgggcctcgaggtcctcgct

SEQ ID NO: 31505 - DNA, 20 bp, Artificial Sequence
  Description of Artificial Sequence: Synthetic oligonucleotide
  Target: COL7A1; (+) strand; PAM type: YTN; PAM sequence: TTT
gggcctcgaggtcctcgctc

SEQ ID NO: 31506 - DNA, 20 bp, Artificial Sequence
  Description of Artificial Sequence: Synthetic oligonucleotide
  Target: COL7A1; (+) strand; PAM type: YTN; PAM sequence: TTG
ggcctcgaggtcctcgctct

SEQ ID NO: 31507 - DNA, 20 bp, Artificial Sequence
  Description of Artificial Sequence: Synthetic oligonucleotide
  Target: COL7A1; (+) strand; PAM type: YTN; PAM sequence: CTC
gaggtcctcgctctccctga

SEQ ID NO: 31508 - DNA, 20 bp, Artificial Sequence
  Description of Artificial Sequence: Synthetic oligonucleotide
  Target: COL7A1; (+) strand; PAM type: YTN; PAM sequence: CTC
gctctccctgaggacgaaac

SEQ ID NO: 31509 - DNA, 20 bp, Artificial Sequence
  Description of Artificial Sequence: Synthetic oligonucleotide
  Target: COL7A1; (+) strand; PAM type: YTN; PAM sequence: CTC
tccctgaggacgaaacagag

SEQ ID NO: 31510 - DNA, 20 bp, Artificial Sequence
  Description of Artificial Sequence: Synthetic oligonucleotide
  Target: COL7A1; (+) strand; PAM type: YTN; PAM sequence: CTC
cctgaggacgaaacagagca

SEQ ID NO: 31511 - DNA, 20 bp, Artificial Sequence
  Description of Artificial Sequence: Synthetic oligonucleotide
  Target: COL7A1; (+) strand; PAM type: YTN; PAM sequence: CTG
aggacgaaacagagcagagg

SEQ ID NO: 31512 - DNA, 20 bp, Artificial Sequence
  Description of Artificial Sequence: Synthetic oligonucleotide
  Target: COL7A1; (+) strand; PAM type: YTN; PAM sequence: CTT
gggctcaggcgaatgtcaac

SEQ ID NO: 31513 - DNA, 20 bp, Artificial Sequence
  Description of Artificial Sequence: Synthetic oligonucleotide
  Target: COL7A1; (+) strand; PAM type: YTN; PAM sequence: TTG
ggctcaggcgaatgtcaacg

SEQ ID NO: 31514 - DNA, 20 bp, Artificial Sequence
  Description of Artificial Sequence: Synthetic oligonucleotide
  Target: COL7A1; (+) strand; PAM type: YTN; PAM sequence: CTC
aggcgaatgtcaacgtgggc

SEQ ID NO: 31515 - DNA, 20 bp, Artificial Sequence
  Description of Artificial Sequence: Synthetic oligonucleotide
  Target: COL7A1; (+) strand; PAM type: YTN; PAM sequence: CTG
caccaccaccccaggctccc

SEQ ID NO: 31516 - DNA, 20 bp, Artificial Sequence
  Description of Artificial Sequence: Synthetic oligonucleotide
  Target: COL7A1; (+) strand; PAM type: YTN; PAM sequence: CTC
ccaccctgtggaagaaccct

SEQ ID NO: 31517 - DNA, 20 bp, Artificial Sequence
  Description of Artificial Sequence: Synthetic oligonucleotide
  Target: COL7A1; (+) strand; PAM type: YTN; PAM sequence: CTG
tggaagaaccctgggaagac

SEQ ID NO: 31518 - DNA, 20 bp, Artificial Sequence
  Description of Artificial Sequence: Synthetic oligonucleotide
  Target: COL7A1; (+) strand; PAM type: YTN; PAM sequence: CTG
ggaagacacttagagagcaa

SEQ ID NO: 31519 - DNA, 20 bp, Artificial Sequence
  Description of Artificial Sequence: Synthetic oligonucleotide
  Target: COL7A1; (+) strand; PAM type: YTN; PAM sequence: CTT
agagagcaaagaagggaagg

SEQ ID NO: 31520 - DNA, 20 bp, Artificial Sequence
  Description of Artificial Sequence: Synthetic oligonucleotide
  Target: COL7A1; (+) strand; PAM type: YTN; PAM sequence: TTA
gagagcaaagaagggaaggc

SEQ ID NO: 31521 - DNA, 20 bp, Artificial Sequence
  Description of Artificial Sequence: Synthetic oligonucleotide
  Target: COL7A1; (+) strand; PAM type: YTN; PAM sequence: CTT
accgggtccccacgagggcc

SEQ ID NO: 31522 - DNA, 20 bp, Artificial Sequence
  Description of Artificial Sequence: Synthetic oligonucleotide
  Target: COL7A1; (+) strand; PAM type: YTN; PAM sequence: TTA
ccgggtccccacgagggcca

SEQ ID NO: 31523 - DNA, 20 bp, Artificial Sequence
  Description of Artificial Sequence: Synthetic oligonucleotide
  Target: COL7A1; (+) strand; PAM type: YTN; PAM sequence: CTG
gagagccctgcaaatggagg

SEQ ID NO: 31524 - DNA, 20 bp, Artificial Sequence
  Description of Artificial Sequence: Synthetic oligonucleotide
  Target: COL7A1; (+) strand; PAM type: YTN; PAM sequence: CTG
caaatggaggccagaggcag

SEQ ID NO: 31525 - DNA, 20 bp, Artificial Sequence
  Description of Artificial Sequence: Synthetic oligonucleotide
  Target: COL7A1; (+) strand; PAM type: YTN; PAM sequence: CTC
aggcagcgcccaccctgacc

SEQ ID NO: 31526 - DNA, 20 bp, Artificial Sequence
  Description of Artificial Sequence: Synthetic oligonucleotide
  Target: COL7A1; (+) strand; PAM type: YTN; PAM sequence: CTG
acctgcaggacaaggcttgc

SEQ ID NO: 31527 - DNA, 20 bp, Artificial Sequence
  Description of Artificial Sequence: Synthetic oligonucleotide
  Target: COL7A1; (+) strand; PAM type: YTN; PAM sequence: CTG
caggacaaggcttgctcacc

SEQ ID NO: 31528 - DNA, 20 bp, Artificial Sequence
  Description of Artificial Sequence: Synthetic oligonucleotide
  Target: COL7A1; (+) strand; PAM type: YTN; PAM sequence: CTT
gctcacctttaggccagggg

SEQ ID NO: 31529 - DNA, 20 bp, Artificial Sequence
  Description of Artificial Sequence: Synthetic oligonucleotide
  Target: COL7A1; (+) strand; PAM type: YTN; PAM sequence: TTG
ctcacctttaggccaggggc

SEQ ID NO: 31530 - DNA, 20 bp, Artificial Sequence
  Description of Artificial Sequence: Synthetic oligonucleotide
  Target: COL7A1; (+) strand; PAM type: YTN; PAM sequence: CTC
acctttaggccaggggctcc

SEQ ID NO: 31531 - DNA, 20 bp, Artificial Sequence
  Description of Artificial Sequence: Synthetic oligonucleotide
  Target: COL7A1; (+) strand; PAM type: YTN; PAM sequence: CTT
taggccaggggctccagggg

SEQ ID NO: 31532 - DNA, 20 bp, Artificial Sequence
  Description of Artificial Sequence: Synthetic oligonucleotide
  Target: COL7A1; (+) strand; PAM type: YTN; PAM sequence: TTT
aggccaggggctccaggggt

SEQ ID NO: 31533 - DNA, 20 bp, Artificial Sequence
  Description of Artificial Sequence: Synthetic oligonucleotide
  Target: COL7A1; (+) strand; PAM type: YTN; PAM sequence: TTA
ggccaggggctccaggggtc

SEQ ID NO: 31534 - DNA, 20 bp, Artificial Sequence
  Description of Artificial Sequence: Synthetic oligonucleotide
  Target: COL7A1; (+) strand; PAM type: YTN; PAM sequence: CTC
caggggtcccaggattcccg

SEQ ID NO: 31535 - DNA, 20 bp, Artificial Sequence
  Description of Artificial Sequence: Synthetic oligonucleotide
  Target: COL7A1; (+) strand; PAM type: YTN; PAM sequence: TTC
ccggcgcggccagggctgcc

SEQ ID NO: 31536 - DNA, 20 bp, Artificial Sequence
  Description of Artificial Sequence: Synthetic oligonucleotide
  Target: COL7A1; (+) strand; PAM type: YTN; PAM sequence: CTG
cctggacgcccatctgctcc

SEQ ID NO: 31537 - DNA, 20 bp, Artificial Sequence
  Description of Artificial Sequence: Synthetic oligonucleotide
  Target: COL7A1; (+) strand; PAM type: YTN; PAM sequence: CTG
gacgcccatctgctccaggg

SEQ ID NO: 31538 - DNA, 20 bp, Artificial Sequence
  Description of Artificial Sequence: Synthetic oligonucleotide
  Target: COL7A1; (+) strand; PAM type: YTN; PAM sequence: CTG
ctccagggaagccctgagga

SEQ ID NO: 31539 - DNA, 20 bp, Artificial Sequence
  Description of Artificial Sequence: Synthetic oligonucleotide
  Target: COL7A1; (+) strand; PAM type: YTN; PAM sequence: CTC
cagggaagccctgaggaggt

SEQ ID NO: 31540 - DNA, 20 bp, Artificial Sequence
  Description of Artificial Sequence: Synthetic oligonucleotide
  Target: COL7A1; (+) strand; PAM type: YTN; PAM sequence: CTG
aggaggtgaagaggtcagga

SEQ ID NO: 31541 - DNA, 20 bp, Artificial Sequence
  Description of Artificial Sequence: Synthetic oligonucleotide
  Target: COL7A1; (+) strand; PAM type: YTN; PAM sequence: CTC
ccccaaggcccctggtttgc

SEQ ID NO: 31542 - DNA, 20 bp, Artificial Sequence
  Description of Artificial Sequence: Synthetic oligonucleotide
  Target: COL7A1; (+) strand; PAM type: YTN; PAM sequence: CTG
gtttgctggaggggcctcac

SEQ ID NO: 31543 - DNA, 20 bp, Artificial Sequence
  Description of Artificial Sequence: Synthetic oligonucleotide
  Target: COL7A1; (+) strand; PAM type: YTN; PAM sequence: TTT
gctggaggggcctcacccca

SEQ ID NO: 31544 - DNA, 20 bp, Artificial Sequence
  Description of Artificial Sequence: Synthetic oligonucleotide
  Target: COL7A1; (+) strand; PAM type: YTN; PAM sequence: TTG
ctggaggggcctcaccccat

SEQ ID NO: 31545 - DNA, 20 bp, Artificial Sequence
  Description of Artificial Sequence: Synthetic oligonucleotide
  Target: COL7A1; (+) strand; PAM type: YTN; PAM sequence: CTG
gaggggcctcaccccatcaa

SEQ ID NO: 31546 - DNA, 20 bp, Artificial Sequence
  Description of Artificial Sequence: Synthetic oligonucleotide
  Target: COL7A1; (+) strand; PAM type: YTN; PAM sequence: CTC
accccatcaacaaggggtcg

SEQ ID NO: 31547 - DNA, 20 bp, Artificial Sequence
  Description of Artificial Sequence: Synthetic oligonucleotide
  Target: COL7A1; (+) strand; PAM type: YTN; PAM sequence: CTA
ccccactgacccccaagtgt

SEQ ID NO: 31548 - DNA, 20 bp, Artificial Sequence
  Description of Artificial Sequence: Synthetic oligonucleotide
  Target: COL7A1; (+) strand; PAM type: YTN; PAM sequence: CTG
acccccaagtgttattgggg

SEQ ID NO: 31549 - DNA, 20 bp, Artificial Sequence
  Description of Artificial Sequence: Synthetic oligonucleotide
  Target: COL7A1; (+) strand; PAM type: YTN; PAM sequence: TTA
ttgggggtggaacagtgagg

SEQ ID NO: 31550 - DNA, 20 bp, Artificial Sequence
  Description of Artificial Sequence: Synthetic oligonucleotide
  Target: COL7A1; (+) strand; PAM type: YTN; PAM sequence: TTG
ggggtggaacagtgaggcag

SEQ ID NO: 31551 - DNA, 20 bp, Artificial Sequence
  Description of Artificial Sequence: Synthetic oligonucleotide
  Target: COL7A1; (+) strand; PAM type: YTN; PAM sequence: CTC
agagcttcacagagcccaat

SEQ ID NO: 31552 - DNA, 20 bp, Artificial Sequence
  Description of Artificial Sequence: Synthetic oligonucleotide
  Target: COL7A1; (+) strand; PAM type: YTN; PAM sequence: CTT
cacagagcccaattccaggc

SEQ ID NO: 31553 - DNA, 20 bp, Artificial Sequence
  Description of Artificial Sequence: Synthetic oligonucleotide
  Target: COL7A1; (+) strand; PAM type: YTN; PAM sequence: TTC
acagagcccaattccaggca

SEQ ID NO: 31554 - DNA, 20 bp, Artificial Sequence
  Description of Artificial Sequence: Synthetic oligonucleotide
  Target: COL7A1; (+) strand; PAM type: YTN; PAM sequence: TTC
caggcacaagggcagcgaca

SEQ ID NO: 31555 - DNA, 20 bp, Artificial Sequence
  Description of Artificial Sequence: Synthetic oligonucleotide
  Target: COL7A1; (+) strand; PAM type: YTN; PAM sequence: CTT
ccctgcctctgggacttgga

SEQ ID NO: 31556 - DNA, 20 bp, Artificial Sequence
  Description of Artificial Sequence: Synthetic oligonucleotide
  Target: COL7A1; (+) strand; PAM type: YTN; PAM sequence: TTC
cctgcctctgggacttggag

SEQ ID NO: 31557 - DNA, 20 bp, Artificial Sequence
  Description of Artificial Sequence: Synthetic oligonucleotide
  Target: COL7A1; (+) strand; PAM type: YTN; PAM sequence: CTG
cctctgggacttggagctgc

SEQ ID NO: 31558 - DNA, 20 bp, Artificial Sequence
  Description of Artificial Sequence: Synthetic oligonucleotide
  Target: COL7A1; (+) strand; PAM type: YTN; PAM sequence: CTC
tgggacttggagctgctgct

SEQ ID NO: 31559 - DNA, 20 bp, Artificial Sequence
  Description of Artificial Sequence: Synthetic oligonucleotide
  Target: COL7A1; (+) strand; PAM type: YTN; PAM sequence: CTG
ggacttggagctgctgctca

SEQ ID NO: 31560 - DNA, 20 bp, Artificial Sequence
  Description of Artificial Sequence: Synthetic oligonucleotide
  Target: COL7A1; (+) strand; PAM type: YTN; PAM sequence: CTT
ggagctgctgctcaggctct

SEQ ID NO: 31561 - DNA, 20 bp, Artificial Sequence
  Description of Artificial Sequence: Synthetic oligonucleotide
  Target: COL7A1; (+) strand; PAM type: YTN; PAM sequence: TTG
gagctgctgctcaggctctg

SEQ ID NO: 31562 - DNA, 20 bp, Artificial Sequence
  Description of Artificial Sequence: Synthetic oligonucleotide
  Target: COL7A1; (+) strand; PAM type: YTN; PAM sequence: CTG
ctgctcaggctctgcagcgg

SEQ ID NO: 31563 - DNA, 20 bp, Artificial Sequence
  Description of Artificial Sequence: Synthetic oligonucleotide
  Target: COL7A1; (+) strand; PAM type: YTN; PAM sequence: CTG
ctcaggctctgcagcggggc

SEQ ID NO: 31564 - DNA, 20 bp, Artificial Sequence
  Description of Artificial Sequence: Synthetic oligonucleotide
  Target: COL7A1; (+) strand; PAM type: YTN; PAM sequence: CTC
aggctctgcagcggggctag

SEQ ID NO: 31565 - DNA, 20 bp, Artificial Sequence
  Description of Artificial Sequence: Synthetic oligonucleotide
  Target: COL7A1; (+) strand; PAM type: YTN; PAM sequence: CTC
tgcagcggggctagaggccc

SEQ ID NO: 31566 - DNA, 20 bp, Artificial Sequence
  Description of Artificial Sequence: Synthetic oligonucleotide
  Target: COL7A1; (+) strand; PAM type: YTN; PAM sequence: CTG
cagcggggctagaggcccca

SEQ ID NO: 31567 - DNA, 20 bp, Artificial Sequence
  Description of Artificial Sequence: Synthetic oligonucleotide
  Target: COL7A1; (+) strand; PAM type: YTN; PAM sequence: CTA
gaggccccactggcccttct

SEQ ID NO: 31568 - DNA, 20 bp, Artificial Sequence
  Description of Artificial Sequence: Synthetic oligonucleotide
  Target: COL7A1; (+) strand; PAM type: YTN; PAM sequence: CTG
gcccttctatttcagagtgt

SEQ ID NO: 31569 - DNA, 20 bp, Artificial Sequence
  Description of Artificial Sequence: Synthetic oligonucleotide
  Target: COL7A1; (+) strand; PAM type: YTN; PAM sequence: CTT
ctatttcagagtgtccccca

SEQ ID NO: 31570 - DNA, 20 bp, Artificial Sequence
  Description of Artificial Sequence: Synthetic oligonucleotide
  Target: COL7A1; (+) strand; PAM type: YTN; PAM sequence: TTC
tatttcagagtgtcccccaa

SEQ ID NO: 31571 - DNA, 20 bp, Artificial Sequence
  Description of Artificial Sequence: Synthetic oligonucleotide
  Target: COL7A1; (+) strand; PAM type: YTN; PAM sequence: CTA
tttcagagtgtcccccaaag

SEQ ID NO: 31572 - DNA, 20 bp, Artificial Sequence
  Description of Artificial Sequence: Synthetic oligonucleotide
  Target: COL7A1; (+) strand; PAM type: YTN; PAM sequence: TTT
cagagtgtcccccaaagtct

SEQ ID NO: 31573 - DNA, 20 bp, Artificial Sequence
  Description of Artificial Sequence: Synthetic oligonucleotide
  Target: COL7A1; (+) strand; PAM type: YTN; PAM sequence: TTC
agagtgtcccccaaagtctc

SEQ ID NO: 31574 - DNA, 20 bp, Artificial Sequence
  Description of Artificial Sequence: Synthetic oligonucleotide
  Target: COL7A1; (+) strand; PAM type: YTN; PAM sequence: CTC
tgtggtggtttataacctcc

SEQ ID NO: 31575 - DNA, 20 bp, Artificial Sequence
  Description of Artificial Sequence: Synthetic oligonucleotide
  Target: COL7A1; (+) strand; PAM type: YTN; PAM sequence: CTG
tggtggtttataacctccag

SEQ ID NO: 31576 - DNA, 20 bp, Artificial Sequence
  Description of Artificial Sequence: Synthetic oligonucleotide
  Target: COL7A1; (+) strand; PAM type: YTN; PAM sequence: TTT
ataacctccagctgggcttc

SEQ ID NO: 31577 - DNA, 20 bp, Artificial Sequence
  Description of Artificial Sequence: Synthetic oligonucleotide
  Target: COL7A1; (+) strand; PAM type: YTN; PAM sequence: TTA
taacctccagctgggcttct

SEQ ID NO: 31578 - DNA, 20 bp, Artificial Sequence
  Description of Artificial Sequence: Synthetic oligonucleotide
  Target: COL7A1; (+) strand; PAM type: YTN; PAM sequence: CTC
cagctgggcttctaggaatt

SEQ ID NO: 31579 - DNA, 20 bp, Artificial Sequence
  Description of Artificial Sequence: Synthetic oligonucleotide
  Target: COL7A1; (+) strand; PAM type: YTN; PAM sequence: CTG
ggcttctaggaattcccgat

SEQ ID NO: 31580 - DNA, 20 bp, Artificial Sequence
  Description of Artificial Sequence: Synthetic oligonucleotide
  Target: COL7A1; (+) strand; PAM type: YTN; PAM sequence: CTT
ctaggaattcccgatgattc

SEQ ID NO: 31581 - DNA, 20 bp, Artificial Sequence
  Description of Artificial Sequence: Synthetic oligonucleotide
  Target: COL7A1; (+) strand; PAM type: YTN; PAM sequence: TTC
taggaattcccgatgattct

SEQ ID NO: 31582 - DNA, 20 bp, Artificial Sequence
  Description of Artificial Sequence: Synthetic oligonucleotide
  Target: COL7A1; (+) strand; PAM type: YTN; PAM sequence: CTA
ggaattcccgatgattctaa

SEQ ID NO: 31583 - DNA, 20 bp, Artificial Sequence
  Description of Artificial Sequence: Synthetic oligonucleotide
  Target: COL7A1; (+) strand; PAM type: YTN; PAM sequence: TTC
ccgatgattctaactctgct

SEQ ID NO: 31584 - DNA, 20 bp, Artificial Sequence
  Description of Artificial Sequence: Synthetic oligonucleotide
  Target: COL7A1; (+) strand; PAM type: YTN; PAM sequence: TTC
taactctgcttcttccttct

SEQ ID NO: 31585 - DNA, 20 bp, Artificial Sequence
  Description of Artificial Sequence: Synthetic oligonucleotide
  Target: COL7A1; (+) strand; PAM type: YTN; PAM sequence: CTA
actctgcttcttccttctct

SEQ ID NO: 31586 - DNA, 20 bp, Artificial Sequence
  Description of Artificial Sequence: Synthetic oligonucleotide
  Target: COL7A1; (+) strand; PAM type: YTN; PAM sequence: CTC
tgcttcttccttctctcttg

SEQ ID NO: 31587 - DNA, 20 bp, Artificial Sequence
  Description of Artificial Sequence: Synthetic oligonucleotide
  Target: COL7A1; (+) strand; PAM type: YTN; PAM sequence: CTG
cttcttccttctctcttgta

SEQ ID NO: 31588 - DNA, 20 bp, Artificial Sequence
  Description of Artificial Sequence: Synthetic oligonucleotide
  Target: COL7A1; (+) strand; PAM type: YTN; PAM sequence: CTT
cttccttctctcttgtaaaa

SEQ ID NO: 31589 - DNA, 20 bp, Artificial Sequence
  Description of Artificial Sequence: Synthetic oligonucleotide
  Target: COL7A1; (+) strand; PAM type: YTN; PAM sequence: TTC
ttccttctctcttgtaaaaa

SEQ ID NO: 31590 - DNA, 20 bp, Artificial Sequence
  Description of Artificial Sequence: Synthetic oligonucleotide
  Target: COL7A1; (+) strand; PAM type: YTN; PAM sequence: CTT
ccttctctcttgtaaaaacc

SEQ ID NO: 31591 - DNA, 20 bp, Artificial Sequence
  Description of Artificial Sequence: Synthetic oligonucleotide
  Target: COL7A1; (+) strand; PAM type: YTN; PAM sequence: TTC
cttctctcttgtaaaaaccc

SEQ ID NO: 31592 - DNA, 20 bp, Artificial Sequence
  Description of Artificial Sequence: Synthetic oligonucleotide
  Target: COL7A1; (+) strand; PAM type: YTN; PAM sequence: CTT
ctctcttgtaaaaaccccga

SEQ ID NO: 31593 - DNA, 20 bp, Artificial Sequence
  Description of Artificial Sequence: Synthetic oligonucleotide
  Target: COL7A1; (+) strand; PAM type: YTN; PAM sequence: TTC
tctcttgtaaaaaccccgag

SEQ ID NO: 31594 - DNA, 20 bp, Artificial Sequence
  Description of Artificial Sequence: Synthetic oligonucleotide
  Target: COL7A1; (+) strand; PAM type: YTN; PAM sequence: CTC
tcttgtaaaaaccccgagac

SEQ ID NO: 31595 - DNA, 20 bp, Artificial Sequence
  Description of Artificial Sequence: Synthetic oligonucleotide
  Target: COL7A1; (+) strand; PAM type: YTN; PAM sequence: CTC
ttgtaaaaaccccgagacag

SEQ ID NO: 31596 - DNA, 20 bp, Artificial Sequence
  Description of Artificial Sequence: Synthetic oligonucleotide
  Target: COL7A1; (+) strand; PAM type: YTN; PAM sequence: CTT
gtaaaaaccccgagacagct

SEQ ID NO: 31597 - DNA, 20 bp, Artificial Sequence
  Description of Artificial Sequence: Synthetic oligonucleotide
  Target: COL7A1; (+) strand; PAM type: YTN; PAM sequence: TTG
taaaaaccccgagacagctt

SEQ ID NO: 31598 - DNA, 20 bp, Artificial Sequence
  Description of Artificial Sequence: Synthetic oligonucleotide
  Target: COL7A1; (+) strand; PAM type: YTN; PAM sequence: CTT
tgaggagtgcctcagagaaa

SEQ ID NO: 31599 - DNA, 20 bp, Artificial Sequence
  Description of Artificial Sequence: Synthetic oligonucleotide
  Target: COL7A1; (+) strand; PAM type: YTN; PAM sequence: TTT
gaggagtgcctcagagaaac

SEQ ID NO: 31600 - DNA, 20 bp, Artificial Sequence
  Description of Artificial Sequence: Synthetic oligonucleotide
  Target: COL7A1; (+) strand; PAM type: YTN; PAM sequence: TTG
aggagtgcctcagagaaacc

SEQ ID NO: 31601 - DNA, 20 bp, Artificial Sequence
  Description of Artificial Sequence: Synthetic oligonucleotide
  Target: COL7A1; (+) strand; PAM type: YTN; PAM sequence: CTC
agagaaacctcgatggtctc

SEQ ID NO: 31602 - DNA, 20 bp, Artificial Sequence
  Description of Artificial Sequence: Synthetic oligonucleotide
  Target: COL7A1; (+) strand; PAM type: YTN; PAM sequence: CTC
gatggtctccacactcaccc

SEQ ID NO: 31603 - DNA, 20 bp, Artificial Sequence
  Description of Artificial Sequence: Synthetic oligonucleotide
  Target: COL7A1; (+) strand; PAM type: YTN; PAM sequence: CTC
cacactcaccctctcgccct

SEQ ID NO: 31604 - DNA, 20 bp, Artificial Sequence
  Description of Artificial Sequence: Synthetic oligonucleotide
  Target: COL7A1; (+) strand; PAM type: YTN; PAM sequence: CTC
accctctcgcccttggcagt

SEQ ID NO: 31605 - DNA, 20 bp, Artificial Sequence
  Description of Artificial Sequence: Synthetic oligonucleotide
  Target: COL7A1; (+) strand; PAM type: YTN; PAM sequence: CTC
tcgcccttggcagtggcact

SEQ ID NO: 31606 - DNA, 20 bp, Artificial Sequence
  Description of Artificial Sequence: Synthetic oligonucleotide
  Target: COL7A1; (+) strand; PAM type: YTN; PAM sequence: CTC
gcccttggcagtggcacttc

SEQ ID NO: 31607 - DNA, 20 bp, Artificial Sequence
  Description of Artificial Sequence: Synthetic oligonucleotide
  Target: COL7A1; (+) strand; PAM type: YTN; PAM sequence: CTT
ggcagtggcacttccagggg

SEQ ID NO: 31608 - DNA, 20 bp, Artificial Sequence
  Description of Artificial Sequence: Synthetic oligonucleotide
  Target: COL7A1; (+) strand; PAM type: YTN; PAM sequence: TTG
gcagtggcacttccaggggg

SEQ ID NO: 31609 - DNA, 20 bp, Artificial Sequence
  Description of Artificial Sequence: Synthetic oligonucleotide
  Target: COL7A1; (+) strand; PAM type: YTN; PAM sequence: CTT
ccagggggcccctgggggcc

SEQ ID NO: 31610 - DNA, 20 bp, Artificial Sequence
  Description of Artificial Sequence: Synthetic oligonucleotide
  Target: COL7A1; (+) strand; PAM type: YTN; PAM sequence: TTC
cagggggcccctgggggccg

SEQ ID NO: 31611 - DNA, 20 bp, Artificial Sequence
  Description of Artificial Sequence: Synthetic oligonucleotide
  Target: COL7A1; (+) strand; PAM type: YTN; PAM sequence: CTG
ggggccgggagcaccggtcc

SEQ ID NO: 31612 - DNA, 20 bp, Artificial Sequence
  Description of Artificial Sequence: Synthetic oligonucleotide
  Target: COL7A1; (+) strand; PAM type: YTN; PAM sequence: CTG
ccctgaaagaagatagcagt

SEQ ID NO: 31613 - DNA, 20 bp, Artificial Sequence
  Description of Artificial Sequence: Synthetic oligonucleotide
  Target: COL7A1; (+) strand; PAM type: YTN; PAM sequence: CTG
aaagaagatagcagttaggt

SEQ ID NO: 31614 - DNA, 20 bp, Artificial Sequence
  Description of Artificial Sequence: Synthetic oligonucleotide
  Target: COL7A1; (+) strand; PAM type: YTN; PAM sequence: TTA
ggtggggataagccagtcag

SEQ ID NO: 31615 - DNA, 20 bp, Artificial Sequence
  Description of Artificial Sequence: Synthetic oligonucleotide
  Target: COL7A1; (+) strand; PAM type: YTN; PAM sequence: CTC
accgggaggccagggtcgcc

SEQ ID NO: 31616 - DNA, 20 bp, Artificial Sequence
  Description of Artificial Sequence: Synthetic oligonucleotide
  Target: COL7A1; (+) strand; PAM type: YTN; PAM sequence: CTT
gtcctctcaggccctaggaa

SEQ ID NO: 31617 - DNA, 20 bp, Artificial Sequence
  Description of Artificial Sequence: Synthetic oligonucleotide
  Target: COL7A1; (+) strand; PAM type: YTN; PAM sequence: TTG
tcctctcaggccctaggaag

SEQ ID NO: 31618 - DNA, 20 bp, Artificial Sequence
  Description of Artificial Sequence: Synthetic oligonucleotide
  Target: COL7A1; (+) strand; PAM type: YTN; PAM sequence: CTC
tcaggccctaggaagggtaa

SEQ ID NO: 31619 - DNA, 20 bp, Artificial Sequence
  Description of Artificial Sequence: Synthetic oligonucleotide
  Target: COL7A1; (+) strand; PAM type: YTN; PAM sequence: CTC
aggccctaggaagggtaatc

SEQ ID NO: 31620 - DNA, 20 bp, Artificial Sequence
  Description of Artificial Sequence: Synthetic oligonucleotide
  Target: COL7A1; (+) strand; PAM type: YTN; PAM sequence: CTA
ggaagggtaatcagtgagac

SEQ ID NO: 31621 - DNA, 20 bp, Artificial Sequence
  Description of Artificial Sequence: Synthetic oligonucleotide
  Target: COL7A1; (+) strand; PAM type: YTN; PAM sequence: CTG
tgctgccaacctctcctgcc

SEQ ID NO: 31622 - DNA, 20 bp, Artificial Sequence
  Description of Artificial Sequence: Synthetic oligonucleotide
  Target: COL7A1; (+) strand; PAM type: YTN; PAM sequence: CTG
ccaacctctcctgccccact

SEQ ID NO: 31623 - DNA, 20 bp, Artificial Sequence
  Description of Artificial Sequence: Synthetic oligonucleotide
  Target: COL7A1; (+) strand; PAM type: YTN; PAM sequence: CTC
tcctgccccactgacactca

SEQ ID NO: 31624 - DNA, 20 bp, Artificial Sequence
  Description of Artificial Sequence: Synthetic oligonucleotide
  Target: COL7A1; (+) strand; PAM type: YTN; PAM sequence: CTC
ctgccccactgacactcaac

SEQ ID NO: 31625 - DNA, 20 bp, Artificial Sequence
  Description of Artificial Sequence: Synthetic oligonucleotide
  Target: COL7A1; (+) strand; PAM type: YTN; PAM sequence: CTG
ccccactgacactcaaccca

SEQ ID NO: 31626 - DNA, 20 bp, Artificial Sequence
  Description of Artificial Sequence: Synthetic oligonucleotide
  Target: COL7A1; (+) strand; PAM type: YTN; PAM sequence: CTG
acactcaacccattctctat

SEQ ID NO: 31627 - DNA, 20 bp, Artificial Sequence
  Description of Artificial Sequence: Synthetic oligonucleotide
  Target: COL7A1; (+) strand; PAM type: YTN; PAM sequence: CTC
aacccattctctattccccg

SEQ ID NO: 31628 - DNA, 20 bp, Artificial Sequence
  Description of Artificial Sequence: Synthetic oligonucleotide
  Target: COL7A1; (+) strand; PAM type: YTN; PAM sequence: TTC
tctattccccgcccgcaggg

SEQ ID NO: 31629 - DNA, 20 bp, Artificial Sequence
  Description of Artificial Sequence: Synthetic oligonucleotide
  Target: COL7A1; (+) strand; PAM type: YTN; PAM sequence: CTC
tattccccgcccgcaggggc

SEQ ID NO: 31630 - DNA, 20 bp, Artificial Sequence
  Description of Artificial Sequence: Synthetic oligonucleotide
  Target: COL7A1; (+) strand; PAM type: YTN; PAM sequence: CTA
ttccccgcccgcaggggcac

SEQ ID NO: 31631 - DNA, 20 bp, Artificial Sequence
  Description of Artificial Sequence: Synthetic oligonucleotide
  Target: COL7A1; (+) strand; PAM type: YTN; PAM sequence: TTC
cccgcccgcaggggcactca

SEQ ID NO: 31632 - DNA, 20 bp, Artificial Sequence
  Description of Artificial Sequence: Synthetic oligonucleotide
  Target: COL7A1; (+) strand; PAM type: YTN; PAM sequence: CTC
accatctctccaggttcccc

SEQ ID NO: 31633 - DNA, 20 bp, Artificial Sequence
  Description of Artificial Sequence: Synthetic oligonucleotide
  Target: COL7A1; (+) strand; PAM type: YTN; PAM sequence: CTC
tccaggttcccccttctggc

SEQ ID NO: 31634 - DNA, 20 bp, Artificial Sequence
  Description of Artificial Sequence: Synthetic oligonucleotide
  Target: COL7A1; (+) strand; PAM type: YTN; PAM sequence: CTC
caggttcccccttctggccc

SEQ ID NO: 31635 - DNA, 20 bp, Artificial Sequence
  Description of Artificial Sequence: Synthetic oligonucleotide
  Target: COL7A1; (+) strand; PAM type: YTN; PAM sequence: TTC
ccccttctggccctggggaa

SEQ ID NO: 31636 - DNA, 20 bp, Artificial Sequence
  Description of Artificial Sequence: Synthetic oligonucleotide
  Target: COL7A1; (+) strand; PAM type: YTN; PAM sequence: CTT
ctggccctggggaaagacat

SEQ ID NO: 31637 - DNA, 20 bp, Artificial Sequence
  Description of Artificial Sequence: Synthetic oligonucleotide
  Target: COL7A1; (+) strand; PAM type: YTN; PAM sequence: TTC
tggccctggggaaagacatg

SEQ ID NO: 31638 - DNA, 20 bp, Artificial Sequence
  Description of Artificial Sequence: Synthetic oligonucleotide
  Target: COL7A1; (+) strand; PAM type: YTN; PAM sequence: CTG
gccctggggaaagacatgtc

SEQ ID NO: 31639 - DNA, 20 bp, Artificial Sequence
  Description of Artificial Sequence: Synthetic oligonucleotide
  Target: COL7A1; (+) strand; PAM type: YTN; PAM sequence: CTG
gggaaagacatgtcagatgt

SEQ ID NO: 31640 - DNA, 20 bp, Artificial Sequence
  Description of Artificial Sequence: Synthetic oligonucleotide
  Target: COL7A1; (+) strand; PAM type: YTN; PAM sequence: CTA
gccccaggtgcagcctctgt

SEQ ID NO: 31641 - DNA, 20 bp, Artificial Sequence
  Description of Artificial Sequence: Synthetic oligonucleotide
  Target: COL7A1; (+) strand; PAM type: YTN; PAM sequence: CTC
tgttcacctctcgatgaggg

SEQ ID NO: 31642 - DNA, 20 bp, Artificial Sequence
  Description of Artificial Sequence: Synthetic oligonucleotide
  Target: COL7A1; (+) strand; PAM type: YTN; PAM sequence: CTG
ttcacctctcgatgagggac

SEQ ID NO: 31643 - DNA, 20 bp, Artificial Sequence
  Description of Artificial Sequence: Synthetic oligonucleotide
  Target: COL7A1; (+) strand; PAM type: YTN; PAM sequence: TTC
acctctcgatgagggactct

SEQ ID NO: 31644 - DNA, 20 bp, Artificial Sequence
  Description of Artificial Sequence: Synthetic oligonucleotide
  Target: COL7A1; (+) strand; PAM type: YTN; PAM sequence: CTC
tcgatgagggactcttacct

SEQ ID NO: 31645 - DNA, 20 bp, Artificial Sequence
  Description of Artificial Sequence: Synthetic oligonucleotide
  Target: COL7A1; (+) strand; PAM type: YTN; PAM sequence: CTC
gatgagggactcttaccttt

SEQ ID NO: 31646 - DNA, 20 bp, Artificial Sequence
  Description of Artificial Sequence: Synthetic oligonucleotide
  Target: COL7A1; (+) strand; PAM type: YTN; PAM sequence: CTC
ttacctttggacaatacact

SEQ ID NO: 31647 - DNA, 20 bp, Artificial Sequence
  Description of Artificial Sequence: Synthetic oligonucleotide
  Target: COL7A1; (+) strand; PAM type: YTN; PAM sequence: CTT
acctttggacaatacactgg

SEQ ID NO: 31648 - DNA, 20 bp, Artificial Sequence
  Description of Artificial Sequence: Synthetic oligonucleotide
  Target: COL7A1; (+) strand; PAM type: YTN; PAM sequence: TTA
cctttggacaatacactggg

SEQ ID NO: 31649 - DNA, 20 bp, Artificial Sequence
  Description of Artificial Sequence: Synthetic oligonucleotide
  Target: COL7A1; (+) strand; PAM type: YTN; PAM sequence: CTT
tggacaatacactgggcagg

SEQ ID NO: 31650 - DNA, 20 bp, Artificial Sequence
  Description of Artificial Sequence: Synthetic oligonucleotide
  Target: COL7A1; (+) strand; PAM type: YTN; PAM sequence: TTT
ggacaatacactgggcaggg

SEQ ID NO: 31651 - DNA, 20 bp, Artificial Sequence
  Description of Artificial Sequence: Synthetic oligonucleotide
  Target: COL7A1; (+) strand; PAM type: YTN; PAM sequence: TTG
gacaatacactgggcagggc

SEQ ID NO: 31652 - DNA, 20 bp, Artificial Sequence
  Description of Artificial Sequence: Synthetic oligonucleotide
  Target: COL7A1; (+) strand; PAM type: YTN; PAM sequence: CTG
ggcagggctctggccggggc

SEQ ID NO: 31653 - DNA, 20 bp, Artificial Sequence
  Description of Artificial Sequence: Synthetic oligonucleotide
  Target: COL7A1; (+) strand; PAM type: YTN; PAM sequence: CTC
tggccggggctgcggacata

SEQ ID NO: 31654 - DNA, 20 bp, Artificial Sequence
  Description of Artificial Sequence: Synthetic oligonucleotide
  Target: COL7A1; (+) strand; PAM type: YTN; PAM sequence: CTG
gccggggctgcggacatagg

SEQ ID NO: 31655 - DNA, 20 bp, Artificial Sequence
  Description of Artificial Sequence: Synthetic oligonucleotide
  Target: COL7A1; (+) strand; PAM type: YTN; PAM sequence: CTG
cggacatagggtctctttga

SEQ ID NO: 31656 - DNA, 20 bp, Artificial Sequence
  Description of Artificial Sequence: Synthetic oligonucleotide
  Target: COL7A1; (+) strand; PAM type: YTN; PAM sequence: CTC
tttgaggttgaacatttcta

SEQ ID NO: 31657 - DNA, 20 bp, Artificial Sequence
  Description of Artificial Sequence: Synthetic oligonucleotide
  Target: COL7A1; (+) strand; PAM type: YTN; PAM sequence: CTT
tgaggttgaacatttctacc

SEQ ID NO: 31658 - DNA, 20 bp, Artificial Sequence
  Description of Artificial Sequence: Synthetic oligonucleotide
  Target: COL7A1; (+) strand; PAM type: YTN; PAM sequence: TTT
gaggttgaacatttctacca

SEQ ID NO: 31659 - DNA, 20 bp, Artificial Sequence
  Description of Artificial Sequence: Synthetic oligonucleotide
  Target: COL7A1; (+) strand; PAM type: YTN; PAM sequence: TTG
aggttgaacatttctaccaa

SEQ ID NO: 31660 - DNA, 20 bp, Artificial Sequence
  Description of Artificial Sequence: Synthetic oligonucleotide
  Target: COL7A1; (+) strand; PAM type: YTN; PAM sequence: TTG
aacatttctaccaagaaccc

SEQ ID NO: 31661 - DNA, 20 bp, Artificial Sequence
  Description of Artificial Sequence: Synthetic oligonucleotide
  Target: COL7A1; (+) strand; PAM type: YTN; PAM sequence: TTT
ctaccaagaacccccagacc

SEQ ID NO: 31662 - DNA, 20 bp, Artificial Sequence
  Description of Artificial Sequence: Synthetic oligonucleotide
  Target: COL7A1; (+) strand; PAM type: YTN; PAM sequence: TTC
taccaagaacccccagaccc

SEQ ID NO: 31663 - DNA, 20 bp, Artificial Sequence
  Description of Artificial Sequence: Synthetic oligonucleotide
  Target: COL7A1; (+) strand; PAM type: YTN; PAM sequence: CTA
ccaagaacccccagacccct

SEQ ID NO: 31664 - DNA, 20 bp, Artificial Sequence
  Description of Artificial Sequence: Synthetic oligonucleotide
  Target: COL7A1; (+) strand; PAM type: YTN; PAM sequence: CTT
atattctaccacccagtccc

SEQ ID NO: 31665 - DNA, 20 bp, Artificial Sequence
  Description of Artificial Sequence: Synthetic oligonucleotide
  Target: COL7A1; (+) strand; PAM type: YTN; PAM sequence: TTA
tattctaccacccagtcccc

SEQ ID NO: 31666 - DNA, 20 bp, Artificial Sequence
  Description of Artificial Sequence: Synthetic oligonucleotide
  Target: COL7A1; (+) strand; PAM type: YTN; PAM sequence: TTC
taccacccagtcccccagag

SEQ ID NO: 31667 - DNA, 20 bp, Artificial Sequence
  Description of Artificial Sequence: Synthetic oligonucleotide
  Target: COL7A1; (+) strand; PAM type: YTN; PAM sequence: CTA
ccacccagtcccccagaggc

SEQ ID NO: 31668 - DNA, 20 bp, Artificial Sequence
  Description of Artificial Sequence: Synthetic oligonucleotide
  Target: COL7A1; (+) strand; PAM type: YTN; PAM sequence: CTC
ttccaaacctgagtagtgaa

SEQ ID NO: 31669 - DNA, 20 bp, Artificial Sequence
  Description of Artificial Sequence: Synthetic oligonucleotide
  Target: COL7A1; (+) strand; PAM type: YTN; PAM sequence: CTT
ccaaacctgagtagtgaagg

SEQ ID NO: 31670 - DNA, 20 bp, Artificial Sequence
  Description of Artificial Sequence: Synthetic oligonucleotide
  Target: COL7A1; (+) strand; PAM type: YTN; PAM sequence: TTC
caaacctgagtagtgaagga

SEQ ID NO: 31671 - DNA, 20 bp, Artificial Sequence
  Description of Artificial Sequence: Synthetic oligonucleotide
  Target: COL7A1; (+) strand; PAM type: YTN; PAM sequence: CTG
agtagtgaaggatgcctgac

SEQ ID NO: 31672 - DNA, 20 bp, Artificial Sequence
  Description of Artificial Sequence: Synthetic oligonucleotide
  Target: COL7A1; (+) strand; PAM type: YTN; PAM sequence: CTG
acacagggctgtggccagac

SEQ ID NO: 31673 - DNA, 20 bp, Artificial Sequence
  Description of Artificial Sequence: Synthetic oligonucleotide
  Target: COL7A1; (+) strand; PAM type: YTN; PAM sequence: CTG
tggccagaccactgactgcc

SEQ ID NO: 31674 - DNA, 20 bp, Artificial Sequence
  Description of Artificial Sequence: Synthetic oligonucleotide
  Target: COL7A1; (+) strand; PAM type: YTN; PAM sequence: CTG
actgcctggtccaggcttgg

SEQ ID NO: 31675 - DNA, 20 bp, Artificial Sequence
  Description of Artificial Sequence: Synthetic oligonucleotide
  Target: COL7A1; (+) strand; PAM type: YTN; PAM sequence: CTG
cctggtccaggcttggccca

SEQ ID NO: 31676 - DNA, 20 bp, Artificial Sequence
  Description of Artificial Sequence: Synthetic oligonucleotide
  Target: COL7A1; (+) strand; PAM type: YTN; PAM sequence: CTG
gtccaggcttggcccatcat

SEQ ID NO: 31677 - DNA, 20 bp, Artificial Sequence
  Description of Artificial Sequence: Synthetic oligonucleotide
  Target: COL7A1; (+) strand; PAM type: YTN; PAM sequence: CTT
ggcccatcatccacggcgaa

SEQ ID NO: 31678 - DNA, 20 bp, Artificial Sequence
  Description of Artificial Sequence: Synthetic oligonucleotide
  Target: COL7A1; (+) strand; PAM type: YTN; PAM sequence: TTG
gcccatcatccacggcgaag

SEQ ID NO: 31679 - DNA, 20 bp, Artificial Sequence
  Description of Artificial Sequence: Synthetic oligonucleotide
  Target: COL7A1; (+) strand; PAM type: YTN; PAM sequence: CTG
gacagagtccatacccggcg

SEQ ID NO: 31680 - DNA, 20 bp, Artificial Sequence
  Description of Artificial Sequence: Synthetic oligonucleotide
  Target: COL7A1; (+) strand; PAM type: YTN; PAM sequence: CTG
ctctgggtccgctccagcca

SEQ ID NO: 31681 - DNA, 20 bp, Artificial Sequence
  Description of Artificial Sequence: Synthetic oligonucleotide
  Target: COL7A1; (+) strand; PAM type: YTN; PAM sequence: CTC
tgggtccgctccagccattc

SEQ ID NO: 31682 - DNA, 20 bp, Artificial Sequence
  Description of Artificial Sequence: Synthetic oligonucleotide
  Target: COL7A1; (+) strand; PAM type: YTN; PAM sequence: CTG
ggtccgctccagccattccc

SEQ ID NO: 31683 - DNA, 20 bp, Artificial Sequence
  Description of Artificial Sequence: Synthetic oligonucleotide
  Target: COL7A1; (+) strand; PAM type: YTN; PAM sequence: CTC
cagccattcccaacatcacc

SEQ ID NO: 31684 - DNA, 20 bp, Artificial Sequence
  Description of Artificial Sequence: Synthetic oligonucleotide
  Target: COL7A1; (+) strand; PAM type: YTN; PAM sequence: TTC
ccaacatcaccacattaagc

SEQ ID NO: 31685 - DNA, 20 bp, Artificial Sequence
  Description of Artificial Sequence: Synthetic oligonucleotide
  Target: COL7A1; (+) strand; PAM type: YTN; PAM sequence: TTA
agccctaaggtggggtccag

SEQ ID NO: 31686 - DNA, 20 bp, Artificial Sequence
  Description of Artificial Sequence: Synthetic oligonucleotide
  Target: COL7A1; (+) strand; PAM type: YTN; PAM sequence: CTA
aggtggggtccagtggctgc

SEQ ID NO: 31687 - DNA, 20 bp, Artificial Sequence
  Description of Artificial Sequence: Synthetic oligonucleotide
  Target: COL7A1; (+) strand; PAM type: YTN; PAM sequence: CTG
catgatagccttttcagggc

SEQ ID NO: 31688 - DNA, 20 bp, Artificial Sequence
  Description of Artificial Sequence: Synthetic oligonucleotide
  Target: COL7A1; (+) strand; PAM type: YTN; PAM sequence: CTT
ttcagggccacccctattcc

SEQ ID NO: 31689 - DNA, 20 bp, Artificial Sequence
  Description of Artificial Sequence: Synthetic oligonucleotide
  Target: COL7A1; (+) strand; PAM type: YTN; PAM sequence: TTT
tcagggccacccctattccc

SEQ ID NO: 31690 - DNA, 20 bp, Artificial Sequence
  Description of Artificial Sequence: Synthetic oligonucleotide
  Target: COL7A1; (+) strand; PAM type: YTN; PAM sequence: TTT
cagggccacccctattccca

SEQ ID NO: 31691 - DNA, 20 bp, Artificial Sequence
  Description of Artificial Sequence: Synthetic oligonucleotide
  Target: COL7A1; (+) strand; PAM type: YTN; PAM sequence: TTC
agggccacccctattcccag

SEQ ID NO: 31692 - DNA, 20 bp, Artificial Sequence
  Description of Artificial Sequence: Synthetic oligonucleotide
  Target: COL7A1; (+) strand; PAM type: YTN; PAM sequence: CTA
ttcccagaccccttccccat

SEQ ID NO: 31693 - DNA, 20 bp, Artificial Sequence
  Description of Artificial Sequence: Synthetic oligonucleotide
  Target: COL7A1; (+) strand; PAM type: YTN; PAM sequence: TTC
ccagaccccttccccatcag

SEQ ID NO: 31694 - DNA, 20 bp, Artificial Sequence
  Description of Artificial Sequence: Synthetic oligonucleotide
  Target: COL7A1; (+) strand; PAM type: YTN; PAM sequence: CTT
ccccatcagcctactcctta

SEQ ID NO: 31695 - DNA, 20 bp, Artificial Sequence
  Description of Artificial Sequence: Synthetic oligonucleotide
  Target: COL7A1; (+) strand; PAM type: YTN; PAM sequence: TTC
cccatcagcctactccttac

SEQ ID NO: 31696 - DNA, 20 bp, Artificial Sequence
  Description of Artificial Sequence: Synthetic oligonucleotide
  Target: COL7A1; (+) strand; PAM type: YTN; PAM sequence: CTA
ctccttaccagaagcctggg

SEQ ID NO: 31697 - DNA, 20 bp, Artificial Sequence
  Description of Artificial Sequence: Synthetic oligonucleotide
  Target: COL7A1; (+) strand; PAM type: YTN; PAM sequence: CTC
cttaccagaagcctgggcct

SEQ ID NO: 31698 - DNA, 20 bp, Artificial Sequence
  Description of Artificial Sequence: Synthetic oligonucleotide
  Target: COL7A1; (+) strand; PAM type: YTN; PAM sequence: CTT
accagaagcctgggcctcac

SEQ ID NO: 31699 - DNA, 20 bp, Artificial Sequence
  Description of Artificial Sequence: Synthetic oligonucleotide
  Target: COL7A1; (+) strand; PAM type: YTN; PAM sequence: TTA
ccagaagcctgggcctcacg

SEQ ID NO: 31700 - DNA, 20 bp, Artificial Sequence
  Description of Artificial Sequence: Synthetic oligonucleotide
  Target: COL7A1; (+) strand; PAM type: YTN; PAM sequence: CTG
ggcctcacggatggggctga

SEQ ID NO: 31701 - DNA, 20 bp, Artificial Sequence
  Description of Artificial Sequence: Synthetic oligonucleotide
  Target: COL7A1; (+) strand; PAM type: YTN; PAM sequence: CTC
acggatggggctgaatatgt

SEQ ID NO: 31702 - DNA, 20 bp, Artificial Sequence
  Description of Artificial Sequence: Synthetic oligonucleotide
  Target: COL7A1; (+) strand; PAM type: YTN; PAM sequence: CTG
aatatgtcacctctcaaggg

SEQ ID NO: 31703 - DNA, 20 bp, Artificial Sequence
  Description of Artificial Sequence: Synthetic oligonucleotide
  Target: COL7A1; (+) strand; PAM type: YTN; PAM sequence: CTC
tcaagggttcatccactagc

SEQ ID NO: 31704 - DNA, 20 bp, Artificial Sequence
  Description of Artificial Sequence: Synthetic oligonucleotide
  Target: COL7A1; (+) strand; PAM type: YTN; PAM sequence: CTC
aagggttcatccactagcag

SEQ ID NO: 31705 - DNA, 20 bp, Artificial Sequence
  Description of Artificial Sequence: Synthetic oligonucleotide
  Target: COL7A1; (+) strand; PAM type: YTN; PAM sequence: TTC
atccactagcagaaccatca

SEQ ID NO: 31706 - DNA, 20 bp, Artificial Sequence
  Description of Artificial Sequence: Synthetic oligonucleotide
  Target: COL7A1; (+) strand; PAM type: YTN; PAM sequence: CTA
gcagaaccatcacccctggt

SEQ ID NO: 31707 - DNA, 20 bp, Artificial Sequence
  Description of Artificial Sequence: Synthetic oligonucleotide
  Target: COL7A1; (+) strand; PAM type: YTN; PAM sequence: CTG
gtacgtgctggcggcgccca

SEQ ID NO: 31708 - DNA, 20 bp, Artificial Sequence
  Description of Artificial Sequence: Synthetic oligonucleotide
  Target: COL7A1; (+) strand; PAM type: YTN; PAM sequence: CTG
gcggcgcccaggagcatctg

SEQ ID NO: 31709 - DNA, 20 bp, Artificial Sequence
  Description of Artificial Sequence: Synthetic oligonucleotide
  Target: COL7A1; (+) strand; PAM type: YTN; PAM sequence: CTG
gtgccaacatgtatctgtga

SEQ ID NO: 31710 - DNA, 20 bp, Artificial Sequence
  Description of Artificial Sequence: Synthetic oligonucleotide
  Target: COL7A1; (+) strand; PAM type: YTN; PAM sequence: CTG
tgagctgtgaccacggctgt

SEQ ID NO: 31711 - DNA, 20 bp, Artificial Sequence
  Description of Artificial Sequence: Synthetic oligonucleotide
  Target: COL7A1; (+) strand; PAM type: YTN; PAM sequence: CTG
tgaccacggctgtgcctgga

SEQ ID NO: 31712 - DNA, 20 bp, Artificial Sequence
  Description of Artificial Sequence: Synthetic oligonucleotide
  Target: COL7A1; (+) strand; PAM type: YTN; PAM sequence: CTG
tgcctggaaggaaggacatg

SEQ ID NO: 31713 - DNA, 20 bp, Artificial Sequence
  Description of Artificial Sequence: Synthetic oligonucleotide
  Target: COL7A1; (+) strand; PAM type: YTN; PAM sequence: CTG
gaaggaaggacatgtcagaa

SEQ ID NO: 31714 - DNA, 20 bp, Artificial Sequence
  Description of Artificial Sequence: Synthetic oligonucleotide
  Target: COL7A1; (+) strand; PAM type: YTN; PAM sequence: CTG
gggcaccaagctcccagtgg

SEQ ID NO: 31715 - DNA, 20 bp, Artificial Sequence
  Description of Artificial Sequence: Synthetic oligonucleotide
  Target: COL7A1; (+) strand; PAM type: YTN; PAM sequence: CTC
ccagtggatagccccaggag

SEQ ID NO: 31716 - DNA, 20 bp, Artificial Sequence
  Description of Artificial Sequence: Synthetic oligonucleotide
  Target: COL7A1; (+) strand; PAM type: YTN; PAM sequence: CTG
ctgcagtcctcacccaggtt

SEQ ID NO: 31717 - DNA, 20 bp, Artificial Sequence
  Description of Artificial Sequence: Synthetic oligonucleotide
  Target: COL7A1; (+) strand; PAM type: YTN; PAM sequence: CTG
cagtcctcacccaggttgtt

SEQ ID NO: 31718 - DNA, 20 bp, Artificial Sequence
  Description of Artificial Sequence: Synthetic oligonucleotide
  Target: COL7A1; (+) strand; PAM type: YTN; PAM sequence: CTC
acccaggttgttcccacttg

SEQ ID NO: 31719 - DNA, 20 bp, Artificial Sequence
  Description of Artificial Sequence: Synthetic oligonucleotide
  Target: COL7A1; (+) strand; PAM type: YTN; PAM sequence: TTG
ttcccacttgggtccatgta

SEQ ID NO: 31720 - DNA, 20 bp, Artificial Sequence
  Description of Artificial Sequence: Synthetic oligonucleotide
  Target: COL7A1; (+) strand; PAM type: YTN; PAM sequence: TTC
ccacttgggtccatgtaggg

SEQ ID NO: 31721 - DNA, 20 bp, Artificial Sequence
  Description of Artificial Sequence: Synthetic oligonucleotide
  Target: COL7A1; (+) strand; PAM type: YTN; PAM sequence: CTT
gggtccatgtagggcatgtc

SEQ ID NO: 31722 - DNA, 20 bp, Artificial Sequence
  Description of Artificial Sequence: Synthetic oligonucleotide
  Target: COL7A1; (+) strand; PAM type: YTN; PAM sequence: TTG
ggtccatgtagggcatgtca

SEQ ID NO: 31723 - DNA, 20 bp, Artificial Sequence
  Description of Artificial Sequence: Synthetic oligonucleotide
  Target: COL7A1; (+) strand; PAM type: YTN; PAM sequence: CTT
tgcaagataatgccaaggtc

SEQ ID NO: 31724 - DNA, 20 bp, Artificial Sequence
  Description of Artificial Sequence: Synthetic oligonucleotide
  Target: COL7A1; (+) strand; PAM type: YTN; PAM sequence: TTT
gcaagataatgccaaggtca

SEQ ID NO: 31725 - DNA, 20 bp, Artificial Sequence
  Description of Artificial Sequence: Synthetic oligonucleotide
  Target: COL7A1; (+) strand; PAM type: YTN; PAM sequence: TTG
caagataatgccaaggtcat

SEQ ID NO: 31726 - DNA, 20 bp, Artificial Sequence
  Description of Artificial Sequence: Synthetic oligonucleotide
  Target: COL7A1; (+) strand; PAM type: YTN; PAM sequence: TTC
agtgggaacagtggggaggg

SEQ ID NO: 31727 - DNA, 20 bp, Artificial Sequence
  Description of Artificial Sequence: Synthetic oligonucleotide
  Target: COL7A1; (+) strand; PAM type: YTN; PAM sequence: CTG
taagacagcaggccaacctg

SEQ ID NO: 31728 - DNA, 20 bp, Artificial Sequence
  Description of Artificial Sequence: Synthetic oligonucleotide
  Target: COL7A1; (+) strand; PAM type: YTN; PAM sequence: CTG
gggtggaaggaaacacagag

SEQ ID NO: 31729 - DNA, 20 bp, Artificial Sequence
  Description of Artificial Sequence: Synthetic oligonucleotide
  Target: COL7A1; (+) strand; PAM type: YTN; PAM sequence: CTG
aggaggatgacagagcaggg

SEQ ID NO: 31730 - DNA, 20 bp, Artificial Sequence
  Description of Artificial Sequence: Synthetic oligonucleotide
  Target: COL7A1; (+) strand; PAM type: YTN; PAM sequence: CTG
gagaaacacatcagggtgtg

SEQ ID NO: 31731 - DNA, 20 bp, Artificial Sequence
  Description of Artificial Sequence: Synthetic oligonucleotide
  Target: COL7A1; (+) strand; PAM type: YTN; PAM sequence: CTA
tctattagggagtcagcagt

SEQ ID NO: 31732 - DNA, 20 bp, Artificial Sequence
  Description of Artificial Sequence: Synthetic oligonucleotide
  Target: COL7A1; (+) strand; PAM type: YTN; PAM sequence: CTA
ttagggagtcagcagtgatg

SEQ ID NO: 31733 - DNA, 20 bp, Artificial Sequence
  Description of Artificial Sequence: Synthetic oligonucleotide
  Target: COL7A1; (+) strand; PAM type: YTN; PAM sequence: TTA
gggagtcagcagtgatggca

SEQ ID NO: 31734 - DNA, 20 bp, Artificial Sequence
  Description of Artificial Sequence: Synthetic oligonucleotide
  Target: COL7A1; (+) strand; PAM type: YTN; PAM sequence: CTG
gagcctgtgagagagctggg

SEQ ID NO: 31735 - DNA, 20 bp, Artificial Sequence
  Description of Artificial Sequence: Synthetic oligonucleotide
  Target: COL7A1; (+) strand; PAM type: YTN; PAM sequence: CTG
tgagagagctgggagaatgc

SEQ ID NO: 31736 - DNA, 20 bp, Artificial Sequence
  Description of Artificial Sequence: Synthetic oligonucleotide
  Target: COL7A1; (+) strand; PAM type: YTN; PAM sequence: CTG
ggagaatgcctgaacctatt

SEQ ID NO: 31737 - DNA, 20 bp, Artificial Sequence
  Description of Artificial Sequence: Synthetic oligonucleotide
  Target: COL7A1; (+) strand; PAM type: YTN; PAM sequence: CTG
aacctattgggtggtcagga

SEQ ID NO: 31738 - DNA, 20 bp, Artificial Sequence
  Description of Artificial Sequence: Synthetic oligonucleotide
  Target: COL7A1; (+) strand; PAM type: YTN; PAM sequence: CTA
ttgggtggtcaggagatggt

SEQ ID NO: 31739 - DNA, 20 bp, Artificial Sequence
  Description of Artificial Sequence: Synthetic oligonucleotide
  Target: COL7A1; (+) strand; PAM type: YTN; PAM sequence: TTG
ggtggtcaggagatggtaac

SEQ ID NO: 31740 - DNA, 20 bp, Artificial Sequence
  Description of Artificial Sequence: Synthetic oligonucleotide
  Target: COL7A1; (+) strand; PAM type: YTN; PAM sequence: CTG
gtatggagcctgggtggggg

SEQ ID NO: 31741 - DNA, 20 bp, Artificial Sequence
  Description of Artificial Sequence: Synthetic oligonucleotide
  Target: COL7A1; (+) strand; PAM type: YTN; PAM sequence: CTG
ggtggggggcctcagggaga

SEQ ID NO: 31742 - DNA, 20 bp, Artificial Sequence
  Description of Artificial Sequence: Synthetic oligonucleotide
  Target: COL7A1; (+) strand; PAM type: YTN; PAM sequence: CTC
agggagaggtagaatctggc

SEQ ID NO: 31743 - DNA, 20 bp, Artificial Sequence
  Description of Artificial Sequence: Synthetic oligonucleotide
  Target: COL7A1; (+) strand; PAM type: YTN; PAM sequence: CTG
gctgccccagggccaaacct

SEQ ID NO: 31744 - DNA, 20 bp, Artificial Sequence
  Description of Artificial Sequence: Synthetic oligonucleotide
  Target: COL7A1; (+) strand; PAM type: YTN; PAM sequence: CTG
ccccagggccaaacctgaac

SEQ ID NO: 31745 - DNA, 20 bp, Artificial Sequence
  Description of Artificial Sequence: Synthetic oligonucleotide
  Target: COL7A1; (+) strand; PAM type: YTN; PAM sequence: CTG
aactgcctgtggcccaagag

SEQ ID NO: 31746 - DNA, 20 bp, Artificial Sequence
  Description of Artificial Sequence: Synthetic oligonucleotide
  Target: COL7A1; (+) strand; PAM type: YTN; PAM sequence: CTG
cctgtggcccaagaggccca

SEQ ID NO: 31747 - DNA, 20 bp, Artificial Sequence
  Description of Artificial Sequence: Synthetic oligonucleotide
  Target: COL7A1; (+) strand; PAM type: YTN; PAM sequence: CTG
tggcccaagaggcccaagtg

SEQ ID NO: 31748 - DNA, 20 bp, Artificial Sequence
  Description of Artificial Sequence: Synthetic oligonucleotide
  Target: COL7A1; (+) strand; PAM type: YTN; PAM sequence: CTC
caggaccctcctcgtagcct

SEQ ID NO: 31749 - DNA, 20 bp, Artificial Sequence
  Description of Artificial Sequence: Synthetic oligonucleotide
  Target: COL7A1; (+) strand; PAM type: YTN; PAM sequence: CTC
ctcgtagcctccgcacggtg

SEQ ID NO: 31750 - DNA, 20 bp, Artificial Sequence
  Description of Artificial Sequence: Synthetic oligonucleotide
  Target: COL7A1; (+) strand; PAM type: YTN; PAM sequence: CTC
gtagcctccgcacggtgagc

SEQ ID NO: 31751 - DNA, 20 bp, Artificial Sequence
  Description of Artificial Sequence: Synthetic oligonucleotide
  Target: COL7A1; (+) strand; PAM type: YTN; PAM sequence: CTC
cgcacggtgagcattgtctt

SEQ ID NO: 31752 - DNA, 20 bp, Artificial Sequence
  Description of Artificial Sequence: Synthetic oligonucleotide
  Target: COL7A1; (+) strand; PAM type: YTN; PAM sequence: TTG
tcttgagtggcatgtggtag

SEQ ID NO: 31753 - DNA, 20 bp, Artificial Sequence
  Description of Artificial Sequence: Synthetic oligonucleotide
  Target: COL7A1; (+) strand; PAM type: YTN; PAM sequence: CTT
gagtggcatgtggtaggaac

SEQ ID NO: 31754 - DNA, 20 bp, Artificial Sequence
  Description of Artificial Sequence: Synthetic oligonucleotide
  Target: COL7A1; (+) strand; PAM type: YTN; PAM sequence: TTG
agtggcatgtggtaggaaca

SEQ ID NO: 31755 - DNA, 20 bp, Artificial Sequence
  Description of Artificial Sequence: Synthetic oligonucleotide
  Target: COL7A1; (+) strand; PAM type: YTN; PAM sequence: CTG
taggaaggggaacaagttac

SEQ ID NO: 31756 - DNA, 20 bp, Artificial Sequence
  Description of Artificial Sequence: Synthetic oligonucleotide
  Target: COL7A1; (+) strand; PAM type: YTN; PAM sequence: TTA
ctgaagcgggcagcccaccc

SEQ ID NO: 31757 - DNA, 20 bp, Artificial Sequence
  Description of Artificial Sequence: Synthetic oligonucleotide
  Target: COL7A1; (+) strand; PAM type: YTN; PAM sequence: CTG
aagcgggcagcccacccaga

SEQ ID NO: 31758 - DNA, 20 bp, Artificial Sequence
  Description of Artificial Sequence: Synthetic oligonucleotide
  Target: COL7A1; (+) strand; PAM type: YTN; PAM sequence: CTT
tctgcccttcccactacgcc

SEQ ID NO: 31759 - DNA, 20 bp, Artificial Sequence
  Description of Artificial Sequence: Synthetic oligonucleotide
  Target: COL7A1; (+) strand; PAM type: YTN; PAM sequence: TTT
ctgcccttcccactacgccc

SEQ ID NO: 31760 - DNA, 20 bp, Artificial Sequence
  Description of Artificial Sequence: Synthetic oligonucleotide
  Target: COL7A1; (+) strand; PAM type: YTN; PAM sequence: TTC
tgcccttcccactacgccca

SEQ ID NO: 31761 - DNA, 20 bp, Artificial Sequence
  Description of Artificial Sequence: Synthetic oligonucleotide
  Target: COL7A1; (+) strand; PAM type: YTN; PAM sequence: CTG
cccttcccactacgcccact

SEQ ID NO: 31762 - DNA, 20 bp, Artificial Sequence
  Description of Artificial Sequence: Synthetic oligonucleotide
  Target: COL7A1; (+) strand; PAM type: YTN; PAM sequence: CTT
cccactacgcccactatacc

SEQ ID NO: 31763 - DNA, 20 bp, Artificial Sequence
  Description of Artificial Sequence: Synthetic oligonucleotide
  Target: COL7A1; (+) strand; PAM type: YTN; PAM sequence: TTC
ccactacgcccactatacct

SEQ ID NO: 31764 - DNA, 20 bp, Artificial Sequence
  Description of Artificial Sequence: Synthetic oligonucleotide
  Target: COL7A1; (+) strand; PAM type: YTN; PAM sequence: CTA
cgcccactatacctggcgtc

SEQ ID NO: 31765 - DNA, 20 bp, Artificial Sequence
  Description of Artificial Sequence: Synthetic oligonucleotide
  Target: COL7A1; (+) strand; PAM type: YTN; PAM sequence: CTA
tacctggcgtctgtgtgaca

SEQ ID NO: 31766 - DNA, 20 bp, Artificial Sequence
  Description of Artificial Sequence: Synthetic oligonucleotide
  Target: COL7A1; (+) strand; PAM type: YTN; PAM sequence: CTG
gcgtctgtgtgacagatgcc

SEQ ID NO: 31767 - DNA, 20 bp, Artificial Sequence
  Description of Artificial Sequence: Synthetic oligonucleotide
  Target: COL7A1; (+) strand; PAM type: YTN; PAM sequence: CTG
tgtgacagatgcctcaggac

SEQ ID NO: 31768 - DNA, 20 bp, Artificial Sequence
  Description of Artificial Sequence: Synthetic oligonucleotide
  Target: COL7A1; (+) strand; PAM type: YTN; PAM sequence: CTC
aggaccccgcacaccatcca

SEQ ID NO: 31769 - DNA, 20 bp, Artificial Sequence
  Description of Artificial Sequence: Synthetic oligonucleotide
  Target: COL7A1; (+) strand; PAM type: YTN; PAM sequence: CTC
tagccctgtcacccgctggg

SEQ ID NO: 31770 - DNA, 20 bp, Artificial Sequence
  Description of Artificial Sequence: Synthetic oligonucleotide
  Target: COL7A1; (+) strand; PAM type: YTN; PAM sequence: CTA
gccctgtcacccgctgggag

SEQ ID NO: 31771 - DNA, 20 bp, Artificial Sequence
  Description of Artificial Sequence: Synthetic oligonucleotide
  Target: COL7A1; (+) strand; PAM type: YTN; PAM sequence: CTG
tcacccgctgggagcttgag

SEQ ID NO: 31772 - DNA, 20 bp, Artificial Sequence
  Description of Artificial Sequence: Synthetic oligonucleotide
  Target: COL7A1; (+) strand; PAM type: YTN; PAM sequence: CTG
ggagcttgagatccctggaa

SEQ ID NO: 31773 - DNA, 20 bp, Artificial Sequence
  Description of Artificial Sequence: Synthetic oligonucleotide
  Target: COL7A1; (+) strand; PAM type: YTN; PAM sequence: CTT
gagatccctggaagtgtctg

SEQ ID NO: 31774 - DNA, 20 bp, Artificial Sequence
  Description of Artificial Sequence: Synthetic oligonucleotide
  Target: COL7A1; (+) strand; PAM type: YTN; PAM sequence: TTG
agatccctggaagtgtctgc

SEQ ID NO: 31775 - DNA, 20 bp, Artificial Sequence
  Description of Artificial Sequence: Synthetic oligonucleotide
  Target: COL7A1; (+) strand; PAM type: YTN; PAM sequence: CTG
gaagtgtctgcggggaccca

SEQ ID NO: 31776 - DNA, 20 bp, Artificial Sequence
  Description of Artificial Sequence: Synthetic oligonucleotide
  Target: COL7A1; (+) strand; PAM type: YTN; PAM sequence: CTG
cggggacccaggcacttctg

SEQ ID NO: 31777 - DNA, 20 bp, Artificial Sequence
  Description of Artificial Sequence: Synthetic oligonucleotide
  Target: COL7A1; (+) strand; PAM type: YTN; PAM sequence: CTT
ctgcaggagacagaacttga

SEQ ID NO: 31778 - DNA, 20 bp, Artificial Sequence
  Description of Artificial Sequence: Synthetic oligonucleotide
  Target: COL7A1; (+) strand; PAM type: YTN; PAM sequence: TTC
tgcaggagacagaacttgat

SEQ ID NO: 31779 - DNA, 20 bp, Artificial Sequence
  Description of Artificial Sequence: Synthetic oligonucleotide
  Target: COL7A1; (+) strand; PAM type: YTN; PAM sequence: CTG
caggagacagaacttgatta

SEQ ID NO: 31780 - DNA, 20 bp, Artificial Sequence
  Description of Artificial Sequence: Synthetic oligonucleotide
  Target: COL7A1; (+) strand; PAM type: YTN; PAM sequence: CTT
gattaaaaagctgtctccac

SEQ ID NO: 31781 - DNA, 20 bp, Artificial Sequence
  Description of Artificial Sequence: Synthetic oligonucleotide
  Target: COL7A1; (+) strand; PAM type: YTN; PAM sequence: TTG
attaaaaagctgtctccaca

SEQ ID NO: 31782 - DNA, 20 bp, Artificial Sequence
  Description of Artificial Sequence: Synthetic oligonucleotide
  Target: COL7A1; (+) strand; PAM type: YTN; PAM sequence: TTA
aaaagctgtctccacagagc

SEQ ID NO: 31783 - DNA, 20 bp, Artificial Sequence
  Description of Artificial Sequence: Synthetic oligonucleotide
  Target: COL7A1; (+) strand; PAM type: YTN; PAM sequence: CTG
tctccacagagccccaactg

SEQ ID NO: 31784 - DNA, 20 bp, Artificial Sequence
  Description of Artificial Sequence: Synthetic oligonucleotide
  Target: COL7A1; (+) strand; PAM type: YTN; PAM sequence: CTC
cacagagccccaactgccag

SEQ ID NO: 31785 - DNA, 20 bp, Artificial Sequence
  Description of Artificial Sequence: Synthetic oligonucleotide
  Target: COL7A1; (+) strand; PAM type: YTN; PAM sequence: CTG
ccagcccacccaaatcctgg

SEQ ID NO: 31786 - DNA, 20 bp, Artificial Sequence
  Description of Artificial Sequence: Synthetic oligonucleotide
  Target: COL7A1; (+) strand; PAM type: YTN; PAM sequence: CTG
gcctccccctcaccctggcc

SEQ ID NO: 31787 - DNA, 20 bp, Artificial Sequence
  Description of Artificial Sequence: Synthetic oligonucleotide
  Target: COL7A1; (+) strand; PAM type: YTN; PAM sequence: CTC
cccctcaccctggccagggc

SEQ ID NO: 31788 - DNA, 20 bp, Artificial Sequence
  Description of Artificial Sequence: Synthetic oligonucleotide
  Target: COL7A1; (+) strand; PAM type: YTN; PAM sequence: CTC
accctggccagggcctctga

SEQ ID NO: 31789 - DNA, 20 bp, Artificial Sequence
  Description of Artificial Sequence: Synthetic oligonucleotide
  Target: COL7A1; (+) strand; PAM type: YTN; PAM sequence: CTG
gccagggcctctgagtggcc

SEQ ID NO: 31790 - DNA, 20 bp, Artificial Sequence
  Description of Artificial Sequence: Synthetic oligonucleotide
  Target: COL7A1; (+) strand; PAM type: YTN; PAM sequence: CTC
tgagtggccgccaggatagg

SEQ ID NO: 31791 - DNA, 20 bp, Artificial Sequence
  Description of Artificial Sequence: Synthetic oligonucleotide
  Target: COL7A1; (+) strand; PAM type: YTN; PAM sequence: CTG
agtggccgccaggataggat

SEQ ID NO: 31792 - DNA, 20 bp, Artificial Sequence
  Description of Artificial Sequence: Synthetic oligonucleotide
  Target: COL7A1; (+) strand; PAM type: YTN; PAM sequence: CTG
gatgccctggacactggagt

SEQ ID NO: 31793 - DNA, 20 bp, Artificial Sequence
  Description of Artificial Sequence: Synthetic oligonucleotide
  Target: COL7A1; (+) strand; PAM type: YTN; PAM sequence: CTG
gacactggagtccaggccaa

SEQ ID NO: 31794 - DNA, 20 bp, Artificial Sequence
  Description of Artificial Sequence: Synthetic oligonucleotide
  Target: COL7A1; (+) strand; PAM type: YTN; PAM sequence: CTG
gagtccaggccaaagtcacc

SEQ ID NO: 31795 - DNA, 20 bp, Artificial Sequence
  Description of Artificial Sequence: Synthetic oligonucleotide
  Target: COL7A1; (+) strand; PAM type: YTN; PAM sequence: TTC
aatgcttggaacacgaggtg

SEQ ID NO: 31796 - DNA, 20 bp, Artificial Sequence
  Description of Artificial Sequence: Synthetic oligonucleotide
  Target: COL7A1; (+) strand; PAM type: YTN; PAM sequence: CTT
ggaacacgaggtgactctga

SEQ ID NO: 31797 - DNA, 20 bp, Artificial Sequence
  Description of Artificial Sequence: Synthetic oligonucleotide
  Target: COL7A1; (+) strand; PAM type: YTN; PAM sequence: TTG
gaacacgaggtgactctgaa

SEQ ID NO: 31798 - DNA, 20 bp, Artificial Sequence
  Description of Artificial Sequence: Synthetic oligonucleotide
  Target: COL7A1; (+) strand; PAM type: YTN; PAM sequence: CTC
tgaaggaggaatgaaagatc

SEQ ID NO: 31799 - DNA, 20 bp, Artificial Sequence
  Description of Artificial Sequence: Synthetic oligonucleotide
  Target: COL7A1; (+) strand; PAM type: YTN; PAM sequence: CTG
aaggaggaatgaaagatcga

SEQ ID NO: 31800 - DNA, 20 bp, Artificial Sequence
  Description of Artificial Sequence: Synthetic oligonucleotide
  Target: COL7A1; (+) strand; PAM type: YTN; PAM sequence: CTG
agtcctgagaacccagaagg

SEQ ID NO: 31801 - DNA, 20 bp, Artificial Sequence
  Description of Artificial Sequence: Synthetic oligonucleotide
  Target: COL7A1; (+) strand; PAM type: YTN; PAM sequence: CTG
agaacccagaagggagagat

SEQ ID NO: 31802 - DNA, 20 bp, Artificial Sequence
  Description of Artificial Sequence: Synthetic oligonucleotide
  Target: COL7A1; (+) strand; PAM type: YTN; PAM sequence: CTG
agatcctgggtccggtttgt

SEQ ID NO: 31803 - DNA, 20 bp, Artificial Sequence
  Description of Artificial Sequence: Synthetic oligonucleotide
  Target: COL7A1; (+) strand; PAM type: YTN; PAM sequence: CTG
ggtccggtttgtcttattga

SEQ ID NO: 31804 - DNA, 20 bp, Artificial Sequence
  Description of Artificial Sequence: Synthetic oligonucleotide
  Target: COL7A1; (+) strand; PAM type: YTN; PAM sequence: TTT
gtcttattgaagcatcatgg

SEQ ID NO: 31805 - DNA, 20 bp, Artificial Sequence
  Description of Artificial Sequence: Synthetic oligonucleotide
  Target: COL7A1; (+) strand; PAM type: YTN; PAM sequence: TTG
tcttattgaagcatcatggg

SEQ ID NO: 31806 - DNA, 20 bp, Artificial Sequence
  Description of Artificial Sequence: Synthetic oligonucleotide
  Target: COL7A1; (+) strand; PAM type: YTN; PAM sequence: CTT
attgaagcatcatgggaggt

SEQ ID NO: 31807 - DNA, 20 bp, Artificial Sequence
  Description of Artificial Sequence: Synthetic oligonucleotide
  Target: COL7A1; (+) strand; PAM type: YTN; PAM sequence: TTA
ttgaagcatcatgggaggtc

SEQ ID NO: 31808 - DNA, 20 bp, Artificial Sequence
  Description of Artificial Sequence: Synthetic oligonucleotide
  Target: COL7A1; (+) strand; PAM type: YTN; PAM sequence: TTG
aagcatcatgggaggtcatg

SEQ ID NO: 31809 - DNA, 20 bp, Artificial Sequence
  Description of Artificial Sequence: Synthetic oligonucleotide
  Target: COL7A1; (+) strand; PAM type: YTN; PAM sequence: CTG
gggtcacccagggtcagagg

SEQ ID NO: 31810 - DNA, 20 bp, Artificial Sequence
  Description of Artificial Sequence: Synthetic oligonucleotide
  Target: COL7A1; (+) strand; PAM type: YTN; PAM sequence: CTC
agagtcggggtgcaggaagt

SEQ ID NO: 31811 - DNA, 20 bp, Artificial Sequence
  Description of Artificial Sequence: Synthetic oligonucleotide
  Target: COL7A1; (+) strand; PAM type: YTN; PAM sequence: CTT
accagtgcgcgcagtcacct

SEQ ID NO: 31812 - DNA, 20 bp, Artificial Sequence
  Description of Artificial Sequence: Synthetic oligonucleotide
  Target: COL7A1; (+) strand; PAM type: YTN; PAM sequence: TTA
ccagtgcgcgcagtcacctc

SEQ ID NO: 31813 - DNA, 20 bp, Artificial Sequence
  Description of Artificial Sequence: Synthetic oligonucleotide
  Target: COL7A1; (+) strand; PAM type: YTN; PAM sequence: CTC
tgcagagggcccttctccag

SEQ ID NO: 31814 - DNA, 20 bp, Artificial Sequence
  Description of Artificial Sequence: Synthetic oligonucleotide
  Target: COL7A1; (+) strand; PAM type: YTN; PAM sequence: CTG
cagagggcccttctccagct

SEQ ID NO: 31815 - DNA, 20 bp, Artificial Sequence
  Description of Artificial Sequence: Synthetic oligonucleotide
  Target: COL7A1; (+) strand; PAM type: YTN; PAM sequence: CTT
ctccagctggccctaggaca

SEQ ID NO: 31816 - DNA, 20 bp, Artificial Sequence
  Description of Artificial Sequence: Synthetic oligonucleotide
  Target: COL7A1; (+) strand; PAM type: YTN; PAM sequence: TTC
tccagctggccctaggacac

SEQ ID NO: 31817 - DNA, 20 bp, Artificial Sequence
  Description of Artificial Sequence: Synthetic oligonucleotide
  Target: COL7A1; (+) strand; PAM type: YTN; PAM sequence: CTC
cagctggccctaggacactc

SEQ ID NO: 31818 - DNA, 20 bp, Artificial Sequence
  Description of Artificial Sequence: Synthetic oligonucleotide
  Target: COL7A1; (+) strand; PAM type: YTN; PAM sequence: CTG
gccctaggacactcagcctc

SEQ ID NO: 31819 - DNA, 20 bp, Artificial Sequence
  Description of Artificial Sequence: Synthetic oligonucleotide
  Target: COL7A1; (+) strand; PAM type: YTN; PAM sequence: CTA
ggacactcagcctcacgcgg

SEQ ID NO: 31820 - DNA, 20 bp, Artificial Sequence
  Description of Artificial Sequence: Synthetic oligonucleotide
  Target: COL7A1; (+) strand; PAM type: YTN; PAM sequence: CTC
agcctcacgcggtactgtgt

SEQ ID NO: 31821 - DNA, 20 bp, Artificial Sequence
  Description of Artificial Sequence: Synthetic oligonucleotide
  Target: COL7A1; (+) strand; PAM type: YTN; PAM sequence: CTC
acgcggtactgtgtcgctgg

SEQ ID NO: 31822 - DNA, 20 bp, Artificial Sequence
  Description of Artificial Sequence: Synthetic oligonucleotide
  Target: COL7A1; (+) strand; PAM type: YTN; PAM sequence: CTG
tgtcgctggctccagcccgt

SEQ ID NO: 31823 - DNA, 20 bp, Artificial Sequence
  Description of Artificial Sequence: Synthetic oligonucleotide
  Target: COL7A1; (+) strand; PAM type: YTN; PAM sequence: CTG
gctccagcccgtccaggtga

SEQ ID NO: 31824 - DNA, 20 bp, Artificial Sequence
  Description of Artificial Sequence: Synthetic oligonucleotide
  Target: COL7A1; (+) strand; PAM type: YTN; PAM sequence: CTC
cagcccgtccaggtgatagc

SEQ ID NO: 31825 - DNA, 20 bp, Artificial Sequence
  Description of Artificial Sequence: Synthetic oligonucleotide
  Target: COL7A1; (+) strand; PAM type: YTN; PAM sequence: CTG
ctgagctcgggccccaggac

SEQ ID NO: 31826 - DNA, 20 bp, Artificial Sequence
  Description of Artificial Sequence: Synthetic oligonucleotide
  Target: COL7A1; (+) strand; PAM type: YTN; PAM sequence: CTG
agctcgggccccaggacccg

SEQ ID NO: 31827 - DNA, 20 bp, Artificial Sequence
  Description of Artificial Sequence: Synthetic oligonucleotide
  Target: COL7A1; (+) strand; PAM type: YTN; PAM sequence: CTC
gggccccaggacccgggact

SEQ ID NO: 31828 - DNA, 20 bp, Artificial Sequence
  Description of Artificial Sequence: Synthetic oligonucleotide
  Target: COL7A1; (+) strand; PAM type: YTN; PAM sequence: CTG
ttcctggccacctggggcag

SEQ ID NO: 31829 - DNA, 20 bp, Artificial Sequence
  Description of Artificial Sequence: Synthetic oligonucleotide
  Target: COL7A1; (+) strand; PAM type: YTN; PAM sequence: TTC
ctggccacctggggcaggcg

SEQ ID NO: 31830 - DNA, 20 bp, Artificial Sequence
  Description of Artificial Sequence: Synthetic oligonucleotide
  Target: COL7A1; (+) strand; PAM type: YTN; PAM sequence: CTG
gccacctggggcaggcgtga

SEQ ID NO: 31831 - DNA, 20 bp, Artificial Sequence
  Description of Artificial Sequence: Synthetic oligonucleotide
  Target: COL7A1; (+) strand; PAM type: YTN; PAM sequence: CTG
gggcaggcgtgagggtgggg

SEQ ID NO: 31832 - DNA, 20 bp, Artificial Sequence
  Description of Artificial Sequence: Synthetic oligonucleotide
  Target: COL7A1; (+) strand; PAM type: YTN; PAM sequence: CTG
ggggcattaaagggcctgcc

SEQ ID NO: 31833 - DNA, 20 bp, Artificial Sequence
  Description of Artificial Sequence: Synthetic oligonucleotide
  Target: COL7A1; (+) strand; PAM type: YTN; PAM sequence: TTA
aagggcctgcccacttcact

SEQ ID NO: 31834 - DNA, 20 bp, Artificial Sequence
  Description of Artificial Sequence: Synthetic oligonucleotide
  Target: COL7A1; (+) strand; PAM type: YTN; PAM sequence: CTG
cccacttcactggctctgtt

SEQ ID NO: 31835 - DNA, 20 bp, Artificial Sequence
  Description of Artificial Sequence: Synthetic oligonucleotide
  Target: COL7A1; (+) strand; PAM type: YTN; PAM sequence: CTT
cactggctctgttaactggg

SEQ ID NO: 31836 - DNA, 20 bp, Artificial Sequence
  Description of Artificial Sequence: Synthetic oligonucleotide
  Target: COL7A1; (+) strand; PAM type: YTN; PAM sequence: TTC
actggctctgttaactgggt

SEQ ID NO: 31837 - DNA, 20 bp, Artificial Sequence
  Description of Artificial Sequence: Synthetic oligonucleotide
  Target: COL7A1; (+) strand; PAM type: YTN; PAM sequence: CTG
gctctgttaactgggttcac

SEQ ID NO: 31838 - DNA, 20 bp, Artificial Sequence
  Description of Artificial Sequence: Synthetic oligonucleotide
  Target: COL7A1; (+) strand; PAM type: YTN; PAM sequence: CTC
tgttaactgggttcaccctc

SEQ ID NO: 31839 - DNA, 20 bp, Artificial Sequence
  Description of Artificial Sequence: Synthetic oligonucleotide
  Target: COL7A1; (+) strand; PAM type: YTN; PAM sequence: CTG
ttaactgggttcaccctcct

SEQ ID NO: 31840 - DNA, 20 bp, Artificial Sequence
  Description of Artificial Sequence: Synthetic oligonucleotide
  Target: COL7A1; (+) strand; PAM type: YTN; PAM sequence: TTA
actgggttcaccctcctgac

SEQ ID NO: 31841 - DNA, 20 bp, Artificial Sequence
  Description of Artificial Sequence: Synthetic oligonucleotide
  Target: COL7A1; (+) strand; PAM type: YTN; PAM sequence: CTG
ggttcaccctcctgactgat

SEQ ID NO: 31842 - DNA, 20 bp, Artificial Sequence
  Description of Artificial Sequence: Synthetic oligonucleotide
  Target: COL7A1; (+) strand; PAM type: YTN; PAM sequence: TTC
accctcctgactgatcttcc

SEQ ID NO: 31843 - DNA, 20 bp, Artificial Sequence
  Description of Artificial Sequence: Synthetic oligonucleotide
  Target: COL7A1; (+) strand; PAM type: YTN; PAM sequence: CTC
ctgactgatcttcctcatcc

SEQ ID NO: 31844 - DNA, 20 bp, Artificial Sequence
  Description of Artificial Sequence: Synthetic oligonucleotide
  Target: COL7A1; (+) strand; PAM type: YTN; PAM sequence: CTG
actgatcttcctcatcctca

SEQ ID NO: 31845 - DNA, 20 bp, Artificial Sequence
  Description of Artificial Sequence: Synthetic oligonucleotide
  Target: COL7A1; (+) strand; PAM type: YTN; PAM sequence: CTG
atcttcctcatcctcactga

SEQ ID NO: 31846 - DNA, 20 bp, Artificial Sequence
  Description of Artificial Sequence: Synthetic oligonucleotide
  Target: COL7A1; (+) strand; PAM type: YTN; PAM sequence: CTT
cctcatcctcactgaccctg

SEQ ID NO: 31847 - DNA, 20 bp, Artificial Sequence
  Description of Artificial Sequence: Synthetic oligonucleotide
  Target: COL7A1; (+) strand; PAM type: YTN; PAM sequence: TTC
ctcatcctcactgaccctgc

SEQ ID NO: 31848 - DNA, 20 bp, Artificial Sequence
  Description of Artificial Sequence: Synthetic oligonucleotide
  Target: COL7A1; (+) strand; PAM type: YTN; PAM sequence: CTC
atcctcactgaccctgccca

SEQ ID NO: 31849 - DNA, 20 bp, Artificial Sequence
  Description of Artificial Sequence: Synthetic oligonucleotide
  Target: COL7A1; (+) strand; PAM type: YTN; PAM sequence: CTC
actgaccctgcccactttac

SEQ ID NO: 31850 - DNA, 20 bp, Artificial Sequence
  Description of Artificial Sequence: Synthetic oligonucleotide
  Target: COL7A1; (+) strand; PAM type: YTN; PAM sequence: CTG
accctgcccactttacggac

SEQ ID NO: 31851 - DNA, 20 bp, Artificial Sequence
  Description of Artificial Sequence: Synthetic oligonucleotide
  Target: COL7A1; (+) strand; PAM type: YTN; PAM sequence: CTG
cccactttacggaccctgcc

SEQ ID NO: 31852 - DNA, 20 bp, Artificial Sequence
  Description of Artificial Sequence: Synthetic oligonucleotide
  Target: COL7A1; (+) strand; PAM type: YTN; PAM sequence: CTT
tacggaccctgccagactga

SEQ ID NO: 31853 - DNA, 20 bp, Artificial Sequence
  Description of Artificial Sequence: Synthetic oligonucleotide
  Target: COL7A1; (+) strand; PAM type: YTN; PAM sequence: TTT
acggaccctgccagactgac

SEQ ID NO: 31854 - DNA, 20 bp, Artificial Sequence
  Description of Artificial Sequence: Synthetic oligonucleotide
  Target: COL7A1; (+) strand; PAM type: YTN; PAM sequence: TTA
cggaccctgccagactgacc

SEQ ID NO: 31855 - DNA, 20 bp, Artificial Sequence
  Description of Artificial Sequence: Synthetic oligonucleotide
  Target: COL7A1; (+) strand; PAM type: YTN; PAM sequence: CTG
ccagactgaccctccatgaa

SEQ ID NO: 31856 - DNA, 20 bp, Artificial Sequence
  Description of Artificial Sequence: Synthetic oligonucleotide
  Target: COL7A1; (+) strand; PAM type: YTN; PAM sequence: CTG
accctccatgaactcattga

SEQ ID NO: 31857 - DNA, 20 bp, Artificial Sequence
  Description of Artificial Sequence: Synthetic oligonucleotide
  Target: COL7A1; (+) strand; PAM type: YTN; PAM sequence: CTC
catgaactcattgatcccac

SEQ ID NO: 31858 - DNA, 20 bp, Artificial Sequence
  Description of Artificial Sequence: Synthetic oligonucleotide
  Target: COL7A1; (+) strand; PAM type: YTN; PAM sequence: CTC
attgatcccacccacttcat

SEQ ID NO: 31859 - DNA, 20 bp, Artificial Sequence
  Description of Artificial Sequence: Synthetic oligonucleotide
  Target: COL7A1; (+) strand; PAM type: YTN; PAM sequence: TTG
atcccacccacttcattgat

SEQ ID NO: 31860 - DNA, 20 bp, Artificial Sequence
  Description of Artificial Sequence: Synthetic oligonucleotide
  Target: COL7A1; (+) strand; PAM type: YTN; PAM sequence: CTT
cattgattgatcttacctac

SEQ ID NO: 31861 - DNA, 20 bp, Artificial Sequence
  Description of Artificial Sequence: Synthetic oligonucleotide
  Target: COL7A1; (+) strand; PAM type: YTN; PAM sequence: TTC
attgattgatcttacctact

SEQ ID NO: 31862 - DNA, 20 bp, Artificial Sequence
  Description of Artificial Sequence: Synthetic oligonucleotide
  Target: COL7A1; (+) strand; PAM type: YTN; PAM sequence: TTG
attgatcttacctactgtca

SEQ ID NO: 31863 - DNA, 20 bp, Artificial Sequence
  Description of Artificial Sequence: Synthetic oligonucleotide
  Target: COL7A1; (+) strand; PAM type: YTN; PAM sequence: TTG
atcttacctactgtcacgga

SEQ ID NO: 31864 - DNA, 20 bp, Artificial Sequence
  Description of Artificial Sequence: Synthetic oligonucleotide
  Target: COL7A1; (+) strand; PAM type: YTN; PAM sequence: CTT
acctactgtcacggatcccg

SEQ ID NO: 31865 - DNA, 20 bp, Artificial Sequence
  Description of Artificial Sequence: Synthetic oligonucleotide
  Target: COL7A1; (+) strand; PAM type: YTN; PAM sequence: TTA
cctactgtcacggatcccgc

SEQ ID NO: 31866 - DNA, 20 bp, Artificial Sequence
  Description of Artificial Sequence: Synthetic oligonucleotide
  Target: COL7A1; (+) strand; PAM type: YTN; PAM sequence: CTA
ctgtcacggatcccgcagac

SEQ ID NO: 31867 - DNA, 20 bp, Artificial Sequence
  Description of Artificial Sequence: Synthetic oligonucleotide
  Target: COL7A1; (+) strand; PAM type: YTN; PAM sequence: CTG
tcacggatcccgcagacccc

SEQ ID NO: 31868 - DNA, 20 bp, Artificial Sequence
  Description of Artificial Sequence: Synthetic oligonucleotide
  Target: COL7A1; (+) strand; PAM type: YTN; PAM sequence: CTG
tcctcgcctaccttgcggag

SEQ ID NO: 31869 - DNA, 20 bp, Artificial Sequence
  Description of Artificial Sequence: Synthetic oligonucleotide
  Target: COL7A1; (+) strand; PAM type: YTN; PAM sequence: CTC
gcctaccttgcggagtctgc

SEQ ID NO: 31870 - DNA, 20 bp, Artificial Sequence
  Description of Artificial Sequence: Synthetic oligonucleotide
  Target: COL7A1; (+) strand; PAM type: YTN; PAM sequence: CTA
ccttgcggagtctgccacag

SEQ ID NO: 31871 - DNA, 20 bp, Artificial Sequence
  Description of Artificial Sequence: Synthetic oligonucleotide
  Target: COL7A1; (+) strand; PAM type: YTN; PAM sequence: CTT
gcggagtctgccacagccct

SEQ ID NO: 31872 - DNA, 20 bp, Artificial Sequence
  Description of Artificial Sequence: Synthetic oligonucleotide
  Target: COL7A1; (+) strand; PAM type: YTN; PAM sequence: TTG
cggagtctgccacagccctg

SEQ ID NO: 31873 - DNA, 20 bp, Artificial Sequence
  Description of Artificial Sequence: Synthetic oligonucleotide
  Target: COL7A1; (+) strand; PAM type: YTN; PAM sequence: CTG
ccacagccctgcccccaatg

SEQ ID NO: 31874 - DNA, 20 bp, Artificial Sequence
  Description of Artificial Sequence: Synthetic oligonucleotide
  Target: COL7A1; (+) strand; PAM type: YTN; PAM sequence: CTG
cccccaatggtccctaactt

SEQ ID NO: 31875 - DNA, 20 bp, Artificial Sequence
  Description of Artificial Sequence: Synthetic oligonucleotide
  Target: COL7A1; (+) strand; PAM type: YTN; PAM sequence: CTA
acttcctcctggggacacct

SEQ ID NO: 31876 - DNA, 20 bp, Artificial Sequence
  Description of Artificial Sequence: Synthetic oligonucleotide
  Target: COL7A1; (+) strand; PAM type: YTN; PAM sequence: CTT
cctcctggggacacctctca

SEQ ID NO: 31877 - DNA, 20 bp, Artificial Sequence
  Description of Artificial Sequence: Synthetic oligonucleotide
  Target: COL7A1; (+) strand; PAM type: YTN; PAM sequence: TTC
ctcctggggacacctctcac

SEQ ID NO: 31878 - DNA, 20 bp, Artificial Sequence
  Description of Artificial Sequence: Synthetic oligonucleotide
  Target: COL7A1; (+) strand; PAM type: YTN; PAM sequence: CTC
ctggggacacctctcaccct

SEQ ID NO: 31879 - DNA, 20 bp, Artificial Sequence
  Description of Artificial Sequence: Synthetic oligonucleotide
  Target: COL7A1; (+) strand; PAM type: YTN; PAM sequence: CTG
gggacacctctcaccctcag

SEQ ID NO: 31880 - DNA, 20 bp, Artificial Sequence
  Description of Artificial Sequence: Synthetic oligonucleotide
  Target: COL7A1; (+) strand; PAM type: YTN; PAM sequence: CTC
tcaccctcaggttgccagtg

SEQ ID NO: 31881 - DNA, 20 bp, Artificial Sequence
  Description of Artificial Sequence: Synthetic oligonucleotide
  Target: COL7A1; (+) strand; PAM type: YTN; PAM sequence: CTC
accctcaggttgccagtgca

SEQ ID NO: 31882 - DNA, 20 bp, Artificial Sequence
  Description of Artificial Sequence: Synthetic oligonucleotide
  Target: COL7A1; (+) strand; PAM type: YTN; PAM sequence: CTC
aggttgccagtgcagaagga

SEQ ID NO: 31883 - DNA, 20 bp, Artificial Sequence
  Description of Artificial Sequence: Synthetic oligonucleotide
  Target: COL7A1; (+) strand; PAM type: YTN; PAM sequence: TTG
ccagtgcagaaggaagccct

SEQ ID NO: 31884 - DNA, 20 bp, Artificial Sequence
  Description of Artificial Sequence: Synthetic oligonucleotide
  Target: COL7A1; (+) strand; PAM type: YTN; PAM sequence: CTG
cgctctgggcaccggctccc

SEQ ID NO: 31885 - DNA, 20 bp, Artificial Sequence
  Description of Artificial Sequence: Synthetic oligonucleotide
  Target: COL7A1; (+) strand; PAM type: YTN; PAM sequence: CTC
tgggcaccggctcccagcgc

SEQ ID NO: 31886 - DNA, 20 bp, Artificial Sequence
  Description of Artificial Sequence: Synthetic oligonucleotide
  Target: COL7A1; (+) strand; PAM type: YTN; PAM sequence: CTG
ggcaccggctcccagcgcag

SEQ ID NO: 31887 - DNA, 20 bp, Artificial Sequence
  Description of Artificial Sequence: Synthetic oligonucleotide
  Target: COL7A1; (+) strand; PAM type: YTN; PAM sequence: CTC
ccagcgcagcctcagcgagt

SEQ ID NO: 31888 - DNA, 20 bp, Artificial Sequence
  Description of Artificial Sequence: Synthetic oligonucleotide
  Target: COL7A1; (+) strand; PAM type: YTN; PAM sequence: CTC
agcgagtgctccccgcgctg

SEQ ID NO: 31889 - DNA, 20 bp, Artificial Sequence
  Description of Artificial Sequence: Synthetic oligonucleotide
  Target: COL7A1; (+) strand; PAM type: YTN; PAM sequence: CTC
cccgcgctgcaccacgtgaa

SEQ ID NO: 31890 - DNA, 20 bp, Artificial Sequence
  Description of Artificial Sequence: Synthetic oligonucleotide
  Target: COL7A1; (+) strand; PAM type: YTN; PAM sequence: CTG
caccacgtgaagcgtcccca

SEQ ID NO: 31891 - DNA, 20 bp, Artificial Sequence
  Description of Artificial Sequence: Synthetic oligonucleotide
  Target: COL7A1; (+) strand; PAM type: YTN; PAM sequence: CTG
gcggagcctcaggcgctgga

SEQ ID NO: 31892 - DNA, 20 bp, Artificial Sequence
  Description of Artificial Sequence: Synthetic oligonucleotide
  Target: COL7A1; (+) strand; PAM type: YTN; PAM sequence: CTC
aggcgctggagagaaagctc

SEQ ID NO: 31893 - DNA, 20 bp, Artificial Sequence
  Description of Artificial Sequence: Synthetic oligonucleotide
  Target: COL7A1; (+) strand; PAM type: YTN; PAM sequence: CTG
gagagaaagctcaggaatca

SEQ ID NO: 31894 - DNA, 20 bp, Artificial Sequence
  Description of Artificial Sequence: Synthetic oligonucleotide
  Target: COL7A1; (+) strand; PAM type: YTN; PAM sequence: CTC
aggaatcagggaggctctgc

SEQ ID NO: 31895 - DNA, 20 bp, Artificial Sequence
  Description of Artificial Sequence: Synthetic oligonucleotide
  Target: COL7A1; (+) strand; PAM type: YTN; PAM sequence: CTC
tgcccccatggcccctgcac

SEQ ID NO: 31896 - DNA, 20 bp, Artificial Sequence
  Description of Artificial Sequence: Synthetic oligonucleotide
  Target: COL7A1; (+) strand; PAM type: YTN; PAM sequence: CTG
cccccatggcccctgcacca

SEQ ID NO: 31897 - DNA, 20 bp, Artificial Sequence
  Description of Artificial Sequence: Synthetic oligonucleotide
  Target: COL7A1; (+) strand; PAM type: YTN; PAM sequence: CTG
caccaatcccaggcccaccc

SEQ ID NO: 31898 - DNA, 20 bp, Artificial Sequence
  Description of Artificial Sequence: Synthetic oligonucleotide
  Target: COL7A1; (+) strand; PAM type: YTN; PAM sequence: CTG
gcacacgcaccccgcccagc

SEQ ID NO: 31899 - DNA, 20 bp, Artificial Sequence
  Description of Artificial Sequence: Synthetic oligonucleotide
  Target: COL7A1; (+) strand; PAM type: YTN; PAM sequence: CTC
tcagacccctctccctcctc

SEQ ID NO: 31900 - DNA, 20 bp, Artificial Sequence
  Description of Artificial Sequence: Synthetic oligonucleotide
  Target: COL7A1; (+) strand; PAM type: YTN; PAM sequence: CTC
agacccctctccctcctctc

SEQ ID NO: 31901 - DNA, 20 bp, Artificial Sequence
  Description of Artificial Sequence: Synthetic oligonucleotide
  Target: COL7A1; (+) strand; PAM type: YTN; PAM sequence: CTC
tccctcctctcagaccctgc

SEQ ID NO: 31902 - DNA, 20 bp, Artificial Sequence
  Description of Artificial Sequence: Synthetic oligonucleotide
  Target: COL7A1; (+) strand; PAM type: YTN; PAM sequence: CTC
cctcctctcagaccctgccc

SEQ ID NO: 31903 - DNA, 20 bp, Artificial Sequence
  Description of Artificial Sequence: Synthetic oligonucleotide
  Target: COL7A1; (+) strand; PAM type: YTN; PAM sequence: CTC
ctctcagaccctgcccccaa

SEQ ID NO: 31904 - DNA, 20 bp, Artificial Sequence
  Description of Artificial Sequence: Synthetic oligonucleotide
  Target: COL7A1; (+) strand; PAM type: YTN; PAM sequence: CTC
tcagaccctgcccccaaagg

SEQ ID NO: 31905 - DNA, 20 bp, Artificial Sequence
  Description of Artificial Sequence: Synthetic oligonucleotide
  Target: COL7A1; (+) strand; PAM type: YTN; PAM sequence: CTC
agaccctgcccccaaaggct

SEQ ID NO: 31906 - DNA, 20 bp, Artificial Sequence
  Description of Artificial Sequence: Synthetic oligonucleotide
  Target: COL7A1; (+) strand; PAM type: YTN; PAM sequence: CTG
cccccaaaggctcactacca

SEQ ID NO: 31907 - DNA, 20 bp, Artificial Sequence
  Description of Artificial Sequence: Synthetic oligonucleotide
  Target: COL7A1; (+) strand; PAM type: YTN; PAM sequence: CTC
actaccaatcctggtccttt

SEQ ID NO: 31908 - DNA, 20 bp, Artificial Sequence
  Description of Artificial Sequence: Synthetic oligonucleotide
  Target: COL7A1; (+) strand; PAM type: YTN; PAM sequence: CTA
ccaatcctggtcctttctcc

SEQ ID NO: 31909 - DNA, 20 bp, Artificial Sequence
  Description of Artificial Sequence: Synthetic oligonucleotide
  Target: COL7A1; (+) strand; PAM type: YTN; PAM sequence: CTG
gtcctttctccaatccagag

SEQ ID NO: 31910 - DNA, 20 bp, Artificial Sequence
  Description of Artificial Sequence: Synthetic oligonucleotide
  Target: COL7A1; (+) strand; PAM type: YTN; PAM sequence: CTT
tctccaatccagagcacaag

SEQ ID NO: 31911 - DNA, 20 bp, Artificial Sequence
  Description of Artificial Sequence: Synthetic oligonucleotide
  Target: COL7A1; (+) strand; PAM type: YTN; PAM sequence: TTT
ctccaatccagagcacaagc

SEQ ID NO: 31912 - DNA, 20 bp, Artificial Sequence
  Description of Artificial Sequence: Synthetic oligonucleotide
  Target: COL7A1; (+) strand; PAM type: YTN; PAM sequence: TTC
tccaatccagagcacaagcc

SEQ ID NO: 31913 - DNA, 20 bp, Artificial Sequence
  Description of Artificial Sequence: Synthetic oligonucleotide
  Target: COL7A1; (+) strand; PAM type: YTN; PAM sequence: CTC
caatccagagcacaagcccg

SEQ ID NO: 31914 - DNA, 20 bp, Artificial Sequence
  Description of Artificial Sequence: Synthetic oligonucleotide
  Target: COL7A1; (+) strand; PAM type: YTN; PAM sequence: CTC
tccagcgcatgctctgccta

SEQ ID NO: 31915 - DNA, 20 bp, Artificial Sequence
  Description of Artificial Sequence: Synthetic oligonucleotide
  Target: COL7A1; (+) strand; PAM type: YTN; PAM sequence: CTC
cagcgcatgctctgcctacg

SEQ ID NO: 31916 - DNA, 20 bp, Artificial Sequence
  Description of Artificial Sequence: Synthetic oligonucleotide
  Target: COL7A1; (+) strand; PAM type: YTN; PAM sequence: CTC
tgcctacgcgtagtgacaac

SEQ ID NO: 31917 - DNA, 20 bp, Artificial Sequence
  Description of Artificial Sequence: Synthetic oligonucleotide
  Target: COL7A1; (+) strand; PAM type: YTN; PAM sequence: CTG
cctacgcgtagtgacaacaa

SEQ ID NO: 31918 - DNA, 20 bp, Artificial Sequence
  Description of Artificial Sequence: Synthetic oligonucleotide
  Target: COL7A1; (+) strand; PAM type: YTN; PAM sequence: CTA
cgcgtagtgacaacaatgga

SEQ ID NO: 31919 - DNA, 20 bp, Artificial Sequence
  Description of Artificial Sequence: Synthetic oligonucleotide
  Target: COL7A1; (+) strand; PAM type: YTN; PAM sequence: CTC
gcggtccccgacaagtgcag

SEQ ID NO: 31920 - DNA, 20 bp, Artificial Sequence
  Description of Artificial Sequence: Synthetic oligonucleotide
  Target: COL7A1; (+) strand; PAM type: YTN; PAM sequence: CTC
gcactgagtagctgactcca

SEQ ID NO: 31921 - DNA, 20 bp, Artificial Sequence
  Description of Artificial Sequence: Synthetic oligonucleotide
  Target: COL7A1; (+) strand; PAM type: YTN; PAM sequence: CTG
agtagctgactccaccttcg

SEQ ID NO: 31922 - DNA, 20 bp, Artificial Sequence
  Description of Artificial Sequence: Synthetic oligonucleotide
  Target: COL7A1; (+) strand; PAM type: YTN; PAM sequence: CTG
actccaccttcgagaccccg

SEQ ID NO: 31923 - DNA, 20 bp, Artificial Sequence
  Description of Artificial Sequence: Synthetic oligonucleotide
  Target: COL7A1; (+) strand; PAM type: YTN; PAM sequence: CTC
caccttcgagaccccggatc

SEQ ID NO: 31924 - DNA, 20 bp, Artificial Sequence
  Description of Artificial Sequence: Synthetic oligonucleotide
  Target: COL7A1; (+) strand; PAM type: YTN; PAM sequence: CTT
cgagaccccggatctctgca

SEQ ID NO: 31925 - DNA, 20 bp, Artificial Sequence
  Description of Artificial Sequence: Synthetic oligonucleotide
  Target: COL7A1; (+) strand; PAM type: YTN; PAM sequence: TTC
gagaccccggatctctgcag

SEQ ID NO: 31926 - DNA, 20 bp, Artificial Sequence
  Description of Artificial Sequence: Synthetic oligonucleotide
  Target: COL7A1; (+) strand; PAM type: YTN; PAM sequence: CTC
tgcagagtctgtgtttcctg

SEQ ID NO: 31927 - DNA, 20 bp, Artificial Sequence
  Description of Artificial Sequence: Synthetic oligonucleotide
  Target: COL7A1; (+) strand; PAM type: YTN; PAM sequence: CTG
cagagtctgtgtttcctggg

SEQ ID NO: 31928 - DNA, 20 bp, Artificial Sequence
  Description of Artificial Sequence: Synthetic oligonucleotide
  Target: COL7A1; (+) strand; PAM type: YTN; PAM sequence: CTG
tgtttcctgggagtatctgg

SEQ ID NO: 31929 - DNA, 20 bp, Artificial Sequence
  Description of Artificial Sequence: Synthetic oligonucleotide
  Target: COL7A1; (+) strand; PAM type: YTN; PAM sequence: TTT
cctgggagtatctggtgcct

SEQ ID NO: 31930 - DNA, 20 bp, Artificial Sequence
  Description of Artificial Sequence: Synthetic oligonucleotide
  Target: COL7A1; (+) strand; PAM type: YTN; PAM sequence: TTC
ctgggagtatctggtgcctc

SEQ ID NO: 31931 - DNA, 20 bp, Artificial Sequence
  Description of Artificial Sequence: Synthetic oligonucleotide
  Target: COL7A1; (+) strand; PAM type: YTN; PAM sequence: CTG
ggagtatctggtgcctcatg

SEQ ID NO: 31932 - DNA, 20 bp, Artificial Sequence
  Description of Artificial Sequence: Synthetic oligonucleotide
  Target: COL7A1; (+) strand; PAM type: YTN; PAM sequence: CTG
gtgcctcatggggccgcctg

SEQ ID NO: 31933 - DNA, 20 bp, Artificial Sequence
  Description of Artificial Sequence: Synthetic oligonucleotide
  Target: COL7A1; (+) strand; PAM type: YTN; PAM sequence: CTC
atggggccgcctggccaggt

SEQ ID NO: 31934 - DNA, 20 bp, Artificial Sequence
  Description of Artificial Sequence: Synthetic oligonucleotide
  Target: COL7A1; (+) strand; PAM type: YTN; PAM sequence: CTG
gccaggtgggcatacagcaa

SEQ ID NO: 31935 - DNA, 20 bp, Artificial Sequence
  Description of Artificial Sequence: Synthetic oligonucleotide
  Target: COL7A1; (+) strand; PAM type: YTN; PAM sequence: TTA
ggggtgagcagtcccagcca

SEQ ID NO: 31936 - DNA, 20 bp, Artificial Sequence
  Description of Artificial Sequence: Synthetic oligonucleotide
  Target: COL7A1; (+) strand; PAM type: YTN; PAM sequence: CTT
cactccggccccaggccagt

SEQ ID NO: 31937 - DNA, 20 bp, Artificial Sequence
  Description of Artificial Sequence: Synthetic oligonucleotide
  Target: COL7A1; (+) strand; PAM type: YTN; PAM sequence: TTC
actccggccccaggccagtc

SEQ ID NO: 31938 - DNA, 20 bp, Artificial Sequence
  Description of Artificial Sequence: Synthetic oligonucleotide
  Target: COL7A1; (+) strand; PAM type: YTN; PAM sequence: CTC
cggccccaggccagtctgta

SEQ ID NO: 31939 - DNA, 20 bp, Artificial Sequence
  Description of Artificial Sequence: Synthetic oligonucleotide
  Target: COL7A1; (+) strand; PAM type: YTN; PAM sequence: CTG
taagctgtggctccagtgac

SEQ ID NO: 31940 - DNA, 20 bp, Artificial Sequence
  Description of Artificial Sequence: Synthetic oligonucleotide
  Target: COL7A1; (+) strand; PAM type: YTN; PAM sequence: CTG
tggctccagtgacccctacc

SEQ ID NO: 31941 - DNA, 20 bp, Artificial Sequence
  Description of Artificial Sequence: Synthetic oligonucleotide
  Target: COL7A1; (+) strand; PAM type: YTN; PAM sequence: CTC
cagtgacccctacccaggtg

SEQ ID NO: 31942 - DNA, 20 bp, Artificial Sequence
  Description of Artificial Sequence: Synthetic oligonucleotide
  Target: COL7A1; (+) strand; PAM type: YTN; PAM sequence: CTA
cccaggtgatccgtagaacg

SEQ ID NO: 31943 - DNA, 20 bp, Artificial Sequence
  Description of Artificial Sequence: Synthetic oligonucleotide
  Target: COL7A1; (+) strand; PAM type: YTN; PAM sequence: CTG
gaagcattgaggatctgcag

SEQ ID NO: 31944 - DNA, 20 bp, Artificial Sequence
  Description of Artificial Sequence: Synthetic oligonucleotide
  Target: COL7A1; (+) strand; PAM type: YTN; PAM sequence: TTG
aggatctgcagcctcgacac

SEQ ID NO: 31945 - DNA, 20 bp, Artificial Sequence
  Description of Artificial Sequence: Synthetic oligonucleotide
  Target: COL7A1; (+) strand; PAM type: YTN; PAM sequence: CTG
cagcctcgacacacgaccca

SEQ ID NO: 31946 - DNA, 20 bp, Artificial Sequence
  Description of Artificial Sequence: Synthetic oligonucleotide
  Target: COL7A1; (+) strand; PAM type: YTN; PAM sequence: CTC
gacacacgacccacaggctc

SEQ ID NO: 31947 - DNA, 20 bp, Artificial Sequence
  Description of Artificial Sequence: Synthetic oligonucleotide
  Target: COL7A1; (+) strand; PAM type: YTN; PAM sequence: CTC
aggggctggggacagaggca

SEQ ID NO: 31948 - DNA, 20 bp, Artificial Sequence
  Description of Artificial Sequence: Synthetic oligonucleotide
  Target: COL7A1; (+) strand; PAM type: YTN; PAM sequence: CTG
gggacagaggcaaggtaagg

SEQ ID NO: 31949 - DNA, 20 bp, Artificial Sequence
  Description of Artificial Sequence: Synthetic oligonucleotide
  Target: COL7A1; (+) strand; PAM type: YTN; PAM sequence: CTG
gtagagaacagagaggcagt

SEQ ID NO: 31950 - DNA, 20 bp, Artificial Sequence
  Description of Artificial Sequence: Synthetic oligonucleotide
  Target: COL7A1; (+) strand; PAM type: YTN; PAM sequence: TTG
acgcaggggtgatctgaaag

SEQ ID NO: 31951 - DNA, 20 bp, Artificial Sequence
  Description of Artificial Sequence: Synthetic oligonucleotide
  Target: COL7A1; (+) strand; PAM type: YTN; PAM sequence: CTG
aaagtcagtgtgaggttagt

SEQ ID NO: 31952 - DNA, 20 bp, Artificial Sequence
  Description of Artificial Sequence: Synthetic oligonucleotide
  Target: COL7A1; (+) strand; PAM type: YTN; PAM sequence: TTA
gtgtggacaggtcactttag

SEQ ID NO: 31953 - DNA, 20 bp, Artificial Sequence
  Description of Artificial Sequence: Synthetic oligonucleotide
  Target: COL7A1; (+) strand; PAM type: YTN; PAM sequence: CTT
taggcagccctgaggaggag

SEQ ID NO: 31954 - DNA, 20 bp, Artificial Sequence
  Description of Artificial Sequence: Synthetic oligonucleotide
  Target: COL7A1; (+) strand; PAM type: YTN; PAM sequence: TTT
aggcagccctgaggaggagg

SEQ ID NO: 31955 - DNA, 20 bp, Artificial Sequence
  Description of Artificial Sequence: Synthetic oligonucleotide
  Target: COL7A1; (+) strand; PAM type: YTN; PAM sequence: TTA
ggcagccctgaggaggagga

SEQ ID NO: 31956 - DNA, 20 bp, Artificial Sequence
  Description of Artificial Sequence: Synthetic oligonucleotide
  Target: COL7A1; (+) strand; PAM type: YTN; PAM sequence: CTG
aggaggaggaggtcagtgcc

SEQ ID NO: 31957 - DNA, 20 bp, Artificial Sequence
  Description of Artificial Sequence: Synthetic oligonucleotide
  Target: COL7A1; (+) strand; PAM type: YTN; PAM sequence: CTT
ggggtgggcagtgtggggcc

SEQ ID NO: 31958 - DNA, 20 bp, Artificial Sequence
  Description of Artificial Sequence: Synthetic oligonucleotide
  Target: COL7A1; (+) strand; PAM type: YTN; PAM sequence: TTG
gggtgggcagtgtggggcca

SEQ ID NO: 31959 - DNA, 20 bp, Artificial Sequence
  Description of Artificial Sequence: Synthetic oligonucleotide
  Target: COL7A1; (+) strand; PAM type: YTN; PAM sequence: CTT
aatcagtgtggggtgggtca

SEQ ID NO: 31960 - DNA, 20 bp, Artificial Sequence
  Description of Artificial Sequence: Synthetic oligonucleotide
  Target: COL7A1; (+) strand; PAM type: YTN; PAM sequence: TTA
atcagtgtggggtgggtcag

SEQ ID NO: 31961 - DNA, 20 bp, Artificial Sequence
  Description of Artificial Sequence: Synthetic oligonucleotide
  Target: COL7A1; (+) strand; PAM type: YTN; PAM sequence: CTG
agcaggggggtggaggcagc

SEQ ID NO: 31962 - DNA, 20 bp, Artificial Sequence
  Description of Artificial Sequence: Synthetic oligonucleotide
  Target: COL7A1; (+) strand; PAM type: YTN; PAM sequence: CTG
ggcaatcaggaacacacagc

SEQ ID NO: 31963 - DNA, 20 bp, Artificial Sequence
  Description of Artificial Sequence: Synthetic oligonucleotide
  Target: COL7A1; (+) strand; PAM type: YTN; PAM sequence: CTA
atgcggtgtggctagtagct

SEQ ID NO: 31964 - DNA, 20 bp, Artificial Sequence
  Description of Artificial Sequence: Synthetic oligonucleotide
  Target: COL7A1; (+) strand; PAM type: YTN; PAM sequence: CTA
gtagctggccagggtccact

SEQ ID NO: 31965 - DNA, 20 bp, Artificial Sequence
  Description of Artificial Sequence: Synthetic oligonucleotide
  Target: COL7A1; (+) strand; PAM type: YTN; PAM sequence: CTG
gccagggtccactcaccagt

SEQ ID NO: 31966 - DNA, 20 bp, Artificial Sequence
  Description of Artificial Sequence: Synthetic oligonucleotide
  Target: COL7A1; (+) strand; PAM type: YTN; PAM sequence: CTC
accagtcctcacaaccacag

SEQ ID NO: 31967 - DNA, 20 bp, Artificial Sequence
  Description of Artificial Sequence: Synthetic oligonucleotide
  Target: COL7A1; (+) strand; PAM type: YTN; PAM sequence: CTC
acaaccacagaggcaggggg

SEQ ID NO: 31968 - DNA, 20 bp, Artificial Sequence
  Description of Artificial Sequence: Synthetic oligonucleotide
  Target: COL7A1; (+) strand; PAM type: YTN; PAM sequence: CTC
acatgcaccgtatactcagt

SEQ ID NO: 31969 - DNA, 20 bp, Artificial Sequence
  Description of Artificial Sequence: Synthetic oligonucleotide
  Target: COL7A1; (+) strand; PAM type: YTN; PAM sequence: CTC
agtatctggctccagtccat

SEQ ID NO: 31970 - DNA, 20 bp, Artificial Sequence
  Description of Artificial Sequence: Synthetic oligonucleotide
  Target: COL7A1; (+) strand; PAM type: YTN; PAM sequence: CTG
gctccagtccatccagctca

SEQ ID NO: 31971 - DNA, 20 bp, Artificial Sequence
  Description of Artificial Sequence: Synthetic oligonucleotide
  Target: COL7A1; (+) strand; PAM type: YTN; PAM sequence: CTC
cagtccatccagctcagcca

SEQ ID NO: 31972 - DNA, 20 bp, Artificial Sequence
  Description of Artificial Sequence: Synthetic oligonucleotide
  Target: COL7A1; (+) strand; PAM type: YTN; PAM sequence: CTC
agccaccgtggcctccccag

SEQ ID NO: 31973 - DNA, 20 bp, Artificial Sequence
  Description of Artificial Sequence: Synthetic oligonucleotide
  Target: COL7A1; (+) strand; PAM type: YTN; PAM sequence: CTC
cccagaaaccaactgggatt

SEQ ID NO: 31974 - DNA, 20 bp, Artificial Sequence
  Description of Artificial Sequence: Synthetic oligonucleotide
  Target: COL7A1; (+) strand; PAM type: YTN; PAM sequence: CTG
ggatttctctgggcctggga

SEQ ID NO: 31975 - DNA, 20 bp, Artificial Sequence
  Description of Artificial Sequence: Synthetic oligonucleotide
  Target: COL7A1; (+) strand; PAM type: YTN; PAM sequence: TTT
ctctgggcctgggaacaggg

SEQ ID NO: 31976 - DNA, 20 bp, Artificial Sequence
  Description of Artificial Sequence: Synthetic oligonucleotide
  Target: COL7A1; (+) strand; PAM type: YTN; PAM sequence: TTC
tctgggcctgggaacaggga

SEQ ID NO: 31977 - DNA, 20 bp, Artificial Sequence
  Description of Artificial Sequence: Synthetic oligonucleotide
  Target: COL7A1; (+) strand; PAM type: YTN; PAM sequence: CTC
tgggcctgggaacagggatg

SEQ ID NO: 31978 - DNA, 20 bp, Artificial Sequence
  Description of Artificial Sequence: Synthetic oligonucleotide
  Target: COL7A1; (+) strand; PAM type: YTN; PAM sequence: CTG
ggcctgggaacagggatgga

SEQ ID NO: 31979 - DNA, 20 bp, Artificial Sequence
  Description of Artificial Sequence: Synthetic oligonucleotide
  Target: COL7A1; (+) strand; PAM type: YTN; PAM sequence: CTG
ggaacagggatggaggcagc

SEQ ID NO: 31980 - DNA, 20 bp, Artificial Sequence
  Description of Artificial Sequence: Synthetic oligonucleotide
  Target: COL7A1; (+) strand; PAM type: YTN; PAM sequence: CTC
cagggctagcaaactctgtg

SEQ ID NO: 31981 - DNA, 20 bp, Artificial Sequence
  Description of Artificial Sequence: Synthetic oligonucleotide
  Target: COL7A1; (+) strand; PAM type: YTN; PAM sequence: CTA
gcaaactctgtgccccagag

SEQ ID NO: 31982 - DNA, 20 bp, Artificial Sequence
  Description of Artificial Sequence: Synthetic oligonucleotide
  Target: COL7A1; (+) strand; PAM type: YTN; PAM sequence: CTC
tgtgccccagagccccacct

SEQ ID NO: 31983 - DNA, 20 bp, Artificial Sequence
  Description of Artificial Sequence: Synthetic oligonucleotide
  Target: COL7A1; (+) strand; PAM type: YTN; PAM sequence: CTG
tgccccagagccccacctgg

SEQ ID NO: 31984 - DNA, 20 bp, Artificial Sequence
  Description of Artificial Sequence: Synthetic oligonucleotide
  Target: COL7A1; (+) strand; PAM type: YTN; PAM sequence: CTG
gacccccaataaacccccag

SEQ ID NO: 31985 - DNA, 20 bp, Artificial Sequence
  Description of Artificial Sequence: Synthetic oligonucleotide
  Target: COL7A1; (+) strand; PAM type: YTN; PAM sequence: TTC
caccctgacctgccccctcc

SEQ ID NO: 31986 - DNA, 20 bp, Artificial Sequence
  Description of Artificial Sequence: Synthetic oligonucleotide
  Target: COL7A1; (+) strand; PAM type: YTN; PAM sequence: CTG
acctgccccctcccaaaccc

SEQ ID NO: 31987 - DNA, 20 bp, Artificial Sequence
  Description of Artificial Sequence: Synthetic oligonucleotide
  Target: COL7A1; (+) strand; PAM type: YTN; PAM sequence: CTG
ccccctcccaaaccccagtc

SEQ ID NO: 31988 - DNA, 20 bp, Artificial Sequence
  Description of Artificial Sequence: Synthetic oligonucleotide
  Target: COL7A1; (+) strand; PAM type: YTN; PAM sequence: CTC
ccaaaccccagtccccaccg

SEQ ID NO: 31989 - DNA, 20 bp, Artificial Sequence
  Description of Artificial Sequence: Synthetic oligonucleotide
  Target: COL7A1; (+) strand; PAM type: YTN; PAM sequence: CTG
agtgccaggaaaccctgtat

SEQ ID NO: 31990 - DNA, 20 bp, Artificial Sequence
  Description of Artificial Sequence: Synthetic oligonucleotide
  Target: COL7A1; (+) strand; PAM type: YTN; PAM sequence: CTG
tatcctgtggcgccaggaac

SEQ ID NO: 31991 - DNA, 20 bp, Artificial Sequence
  Description of Artificial Sequence: Synthetic oligonucleotide
  Target: COL7A1; (+) strand; PAM type: YTN; PAM sequence: CTG
tggcgccaggaaccctggtc

SEQ ID NO: 31992 - DNA, 20 bp, Artificial Sequence
  Description of Artificial Sequence: Synthetic oligonucleotide
  Target: COL7A1; (+) strand; PAM type: YTN; PAM sequence: CTG
gtccaggtaatggtgacaga

SEQ ID NO: 31993 - DNA, 20 bp, Artificial Sequence
  Description of Artificial Sequence: Synthetic oligonucleotide
  Target: COL7A1; (+) strand; PAM type: YTN; PAM sequence: CTG
ctggcctgagtcacatggac

SEQ ID NO: 31994 - DNA, 20 bp, Artificial Sequence
  Description of Artificial Sequence: Synthetic oligonucleotide
  Target: COL7A1; (+) strand; PAM type: YTN; PAM sequence: CTG
gcctgagtcacatggaccgt

SEQ ID NO: 31995 - DNA, 20 bp, Artificial Sequence
  Description of Artificial Sequence: Synthetic oligonucleotide
  Target: COL7A1; (+) strand; PAM type: YTN; PAM sequence: CTG
agtcacatggaccgtcctca

SEQ ID NO: 31996 - DNA, 20 bp, Artificial Sequence
  Description of Artificial Sequence: Synthetic oligonucleotide
  Target: COL7A1; (+) strand; PAM type: YTN; PAM sequence: CTC
actgggcccagtgggtctag

SEQ ID NO: 31997 - DNA, 20 bp, Artificial Sequence
  Description of Artificial Sequence: Synthetic oligonucleotide
  Target: COL7A1; (+) strand; PAM type: YTN; PAM sequence: CTG
ggcccagtgggtctagtggg

SEQ ID NO: 31998 - DNA, 20 bp, Artificial Sequence
  Description of Artificial Sequence: Synthetic oligonucleotide
  Target: COL7A1; (+) strand; PAM type: YTN; PAM sequence: CTA
gtggggagaggcaatgggga

SEQ ID NO: 31999 - DNA, 20 bp, Artificial Sequence
  Description of Artificial Sequence: Synthetic oligonucleotide
  Target: COL7A1; (+) strand; PAM type: YTN; PAM sequence: CTG
ctggaacaggcaggaaggag

SEQ ID NO: 32000 - DNA, 20 bp, Artificial Sequence
  Description of Artificial Sequence: Synthetic oligonucleotide
  Target: COL7A1; (+) strand; PAM type: YTN; PAM sequence: CTG
gaacaggcaggaaggagtgg

SEQ ID NO: 32001 - DNA, 20 bp, Artificial Sequence
  Description of Artificial Sequence: Synthetic oligonucleotide
  Target: COL7A1; (+) strand; PAM type: YTN; PAM sequence: CTA
tctgataggggaagatgatg

SEQ ID NO: 32002 - DNA, 20 bp, Artificial Sequence
  Description of Artificial Sequence: Synthetic oligonucleotide
  Target: COL7A1; (+) strand; PAM type: YTN; PAM sequence: CTG
ataggggaagatgatgggag

SEQ ID NO: 32003 - DNA, 20 bp, Artificial Sequence
  Description of Artificial Sequence: Synthetic oligonucleotide
  Target: COL7A1; (+) strand; PAM type: YTN; PAM sequence: CTA
acaggagacgggaatttgat

SEQ ID NO: 32004 - DNA, 20 bp, Artificial Sequence
  Description of Artificial Sequence: Synthetic oligonucleotide
  Target: COL7A1; (+) strand; PAM type: YTN; PAM sequence: TTT
gatagaggagatggtgaata

SEQ ID NO: 32005 - DNA, 20 bp, Artificial Sequence
  Description of Artificial Sequence: Synthetic oligonucleotide
  Target: COL7A1; (+) strand; PAM type: YTN; PAM sequence: TTG
atagaggagatggtgaatag

SEQ ID NO: 32006 - DNA, 20 bp, Artificial Sequence
  Description of Artificial Sequence: Synthetic oligonucleotide
  Target: COL7A1; (+) strand; PAM type: YTN; PAM sequence: TTT
taggaagcagtgagcaggtc

SEQ ID NO: 32007 - DNA, 20 bp, Artificial Sequence
  Description of Artificial Sequence: Synthetic oligonucleotide
  Target: COL7A1; (+) strand; PAM type: YTN; PAM sequence: TTT
aggaagcagtgagcaggtct

SEQ ID NO: 32008 - DNA, 20 bp, Artificial Sequence
  Description of Artificial Sequence: Synthetic oligonucleotide
  Target: COL7A1; (+) strand; PAM type: YTN; PAM sequence: TTA
ggaagcagtgagcaggtctg

SEQ ID NO: 32009 - DNA, 20 bp, Artificial Sequence
  Description of Artificial Sequence: Synthetic oligonucleotide
  Target: COL7A1; (+) strand; PAM type: YTN; PAM sequence: CTG
atggaggagaaagtgtaaat

SEQ ID NO: 32010 - DNA, 20 bp, Artificial Sequence
  Description of Artificial Sequence: Synthetic oligonucleotide
  Target: COL7A1; (+) strand; PAM type: YTN; PAM sequence: CTC
agaggagatttgggtccagc

SEQ ID NO: 32011 - DNA, 20 bp, Artificial Sequence
  Description of Artificial Sequence: Synthetic oligonucleotide
  Target: COL7A1; (+) strand; PAM type: YTN; PAM sequence: TTT
gggtccagcaaaaaagggat

SEQ ID NO: 32012 - DNA, 20 bp, Artificial Sequence
  Description of Artificial Sequence: Synthetic oligonucleotide
  Target: COL7A1; (+) strand; PAM type: YTN; PAM sequence: TTG
ggtccagcaaaaaagggatg

SEQ ID NO: 32013 - DNA, 20 bp, Artificial Sequence
  Description of Artificial Sequence: Synthetic oligonucleotide
  Target: COL7A1; (+) strand; PAM type: YTN; PAM sequence: CTG
agggttgaagtggtggatat

SEQ ID NO: 32014 - DNA, 20 bp, Artificial Sequence
  Description of Artificial Sequence: Synthetic oligonucleotide
  Target: COL7A1; (+) strand; PAM type: YTN; PAM sequence: TTG
aagtggtggatatttgaggg

SEQ ID NO: 32015 - DNA, 20 bp, Artificial Sequence
  Description of Artificial Sequence: Synthetic oligonucleotide
  Target: COL7A1; (+) strand; PAM type: YTN; PAM sequence: TTT
gagggcaaaggctgtgggag

SEQ ID NO: 32016 - DNA, 20 bp, Artificial Sequence
  Description of Artificial Sequence: Synthetic oligonucleotide
  Target: COL7A1; (+) strand; PAM type: YTN; PAM sequence: TTG
agggcaaaggctgtgggagt

SEQ ID NO: 32017 - DNA, 20 bp, Artificial Sequence
  Description of Artificial Sequence: Synthetic oligonucleotide
  Target: COL7A1; (+) strand; PAM type: YTN; PAM sequence: CTG
tgggagtcttaggagagaag

SEQ ID NO: 32018 - DNA, 20 bp, Artificial Sequence
  Description of Artificial Sequence: Synthetic oligonucleotide
  Target: COL7A1; (+) strand; PAM type: YTN; PAM sequence: CTT
aggagagaagcggaggaatc

SEQ ID NO: 32019 - DNA, 20 bp, Artificial Sequence
  Description of Artificial Sequence: Synthetic oligonucleotide
  Target: COL7A1; (+) strand; PAM type: YTN; PAM sequence: TTA
ggagagaagcggaggaatct

SEQ ID NO: 32020 - DNA, 20 bp, Artificial Sequence
  Description of Artificial Sequence: Synthetic oligonucleotide
  Target: COL7A1; (+) strand; PAM type: YTN; PAM sequence: CTG
aatacggggagggcttaagg

SEQ ID NO: 32021 - DNA, 20 bp, Artificial Sequence
  Description of Artificial Sequence: Synthetic oligonucleotide
  Target: COL7A1; (+) strand; PAM type: YTN; PAM sequence: CTT
aaggggagacagctgaaact

SEQ ID NO: 32022 - DNA, 20 bp, Artificial Sequence
  Description of Artificial Sequence: Synthetic oligonucleotide
  Target: COL7A1; (+) strand; PAM type: YTN; PAM sequence: TTA
aggggagacagctgaaactg

SEQ ID NO: 32023 - DNA, 20 bp, Artificial Sequence
  Description of Artificial Sequence: Synthetic oligonucleotide
  Target: COL7A1; (+) strand; PAM type: YTN; PAM sequence: CTG
aaactgaagaggaagcagcg

SEQ ID NO: 32024 - DNA, 20 bp, Artificial Sequence
  Description of Artificial Sequence: Synthetic oligonucleotide
  Target: COL7A1; (+) strand; PAM type: YTN; PAM sequence: CTG
aagaggaagcagcgtctctg

SEQ ID NO: 32025 - DNA, 20 bp, Artificial Sequence
  Description of Artificial Sequence: Synthetic oligonucleotide
  Target: COL7A1; (+) strand; PAM type: YTN; PAM sequence: CTC
tgagggaggagggagtggga

SEQ ID NO: 32026 - DNA, 20 bp, Artificial Sequence
  Description of Artificial Sequence: Synthetic oligonucleotide
  Target: COL7A1; (+) strand; PAM type: YTN; PAM sequence: CTG
agggaggagggagtgggatt

SEQ ID NO: 32027 - DNA, 20 bp, Artificial Sequence
  Description of Artificial Sequence: Synthetic oligonucleotide
  Target: COL7A1; (+) strand; PAM type: YTN; PAM sequence: TTC
tgaagggggaggcaggagtt

SEQ ID NO: 32028 - DNA, 20 bp, Artificial Sequence
  Description of Artificial Sequence: Synthetic oligonucleotide
  Target: COL7A1; (+) strand; PAM type: YTN; PAM sequence: CTG
aagggggaggcaggagttct

SEQ ID NO: 32029 - DNA, 20 bp, Artificial Sequence
  Description of Artificial Sequence: Synthetic oligonucleotide
  Target: COL7A1; (+) strand; PAM type: YTN; PAM sequence: TTC
tggggagaagcaagggtctg

SEQ ID NO: 32030 - DNA, 20 bp, Artificial Sequence
  Description of Artificial Sequence: Synthetic oligonucleotide
  Target: COL7A1; (+) strand; PAM type: YTN; PAM sequence: CTG
gggagaagcaagggtctgca

SEQ ID NO: 32031 - DNA, 20 bp, Artificial Sequence
  Description of Artificial Sequence: Synthetic oligonucleotide
  Target: COL7A1; (+) strand; PAM type: YTN; PAM sequence: CTG
caagggaaggcatgggggtc

SEQ ID NO: 32032 - DNA, 20 bp, Artificial Sequence
  Description of Artificial Sequence: Synthetic oligonucleotide
  Target: COL7A1; (+) strand; PAM type: YTN; PAM sequence: CTG
aaagagcaatggaggcagag

SEQ ID NO: 32033 - DNA, 20 bp, Artificial Sequence
  Description of Artificial Sequence: Synthetic oligonucleotide
  Target: COL7A1; (+) strand; PAM type: YTN; PAM sequence: CTG
acccgttcgagccacgatga

SEQ ID NO: 32034 - DNA, 20 bp, Artificial Sequence
  Description of Artificial Sequence: Synthetic oligonucleotide
  Target: COL7A1; (+) strand; PAM type: YTN; PAM sequence: TTC
gagccacgatgactgcagca

SEQ ID NO: 32035 - DNA, 20 bp, Artificial Sequence
  Description of Artificial Sequence: Synthetic oligonucleotide
  Target: COL7A1; (+) strand; PAM type: YTN; PAM sequence: CTG
cagcagggccctcctctctg

SEQ ID NO: 32036 - DNA, 20 bp, Artificial Sequence
  Description of Artificial Sequence: Synthetic oligonucleotide
  Target: COL7A1; (+) strand; PAM type: YTN; PAM sequence: CTC
ctctctgcctcgcagtaccg

SEQ ID NO: 32037 - DNA, 20 bp, Artificial Sequence
  Description of Artificial Sequence: Synthetic oligonucleotide
  Target: COL7A1; (+) strand; PAM type: YTN; PAM sequence: CTC
tctgcctcgcagtaccgaca

SEQ ID NO: 32038 - DNA, 20 bp, Artificial Sequence
  Description of Artificial Sequence: Synthetic oligonucleotide
  Target: COL7A1; (+) strand; PAM type: YTN; PAM sequence: CTC
tgcctcgcagtaccgacaca

SEQ ID NO: 32039 - DNA, 20 bp, Artificial Sequence
  Description of Artificial Sequence: Synthetic oligonucleotide
  Target: COL7A1; (+) strand; PAM type: YTN; PAM sequence: CTG
cctcgcagtaccgacacagc

SEQ ID NO: 32040 - DNA, 20 bp, Artificial Sequence
  Description of Artificial Sequence: Synthetic oligonucleotide
  Target: COL7A1; (+) strand; PAM type: YTN; PAM sequence: CTC
gcagtaccgacacagccacc

SEQ ID NO: 32041 - DNA, 20 bp, Artificial Sequence
  Description of Artificial Sequence: Synthetic oligonucleotide
  Target: COL7A1; (+) strand; PAM type: YTN; PAM sequence: CTG
gtaggtggttccaggctgca

SEQ ID NO: 32042 - DNA, 20 bp, Artificial Sequence
  Description of Artificial Sequence: Synthetic oligonucleotide
  Target: COL7A1; (+) strand; PAM type: YTN; PAM sequence: TTC
caggctgcagccctgtgatg

SEQ ID NO: 32043 - DNA, 20 bp, Artificial Sequence
  Description of Artificial Sequence: Synthetic oligonucleotide
  Target: COL7A1; (+) strand; PAM type: YTN; PAM sequence: CTG
cagccctgtgatgtctgtgg

SEQ ID NO: 32044 - DNA, 20 bp, Artificial Sequence
  Description of Artificial Sequence: Synthetic oligonucleotide
  Target: COL7A1; (+) strand; PAM type: YTN; PAM sequence: CTG
tgatgtctgtggcagtagag

SEQ ID NO: 32045 - DNA, 20 bp, Artificial Sequence
  Description of Artificial Sequence: Synthetic oligonucleotide
  Target: COL7A1; (+) strand; PAM type: YTN; PAM sequence: CTG
tggcagtagagtctgggggc

SEQ ID NO: 32046 - DNA, 20 bp, Artificial Sequence
  Description of Artificial Sequence: Synthetic oligonucleotide
  Target: COL7A1; (+) strand; PAM type: YTN; PAM sequence: CTG
ggggcagtgtctggctggac

SEQ ID NO: 32047 - DNA, 20 bp, Artificial Sequence
  Description of Artificial Sequence: Synthetic oligonucleotide
  Target: COL7A1; (+) strand; PAM type: YTN; PAM sequence: CTG
gctggactccggacctgagg

SEQ ID NO: 32048 - DNA, 20 bp, Artificial Sequence
  Description of Artificial Sequence: Synthetic oligonucleotide
  Target: COL7A1; (+) strand; PAM type: YTN; PAM sequence: CTG
gactccggacctgaggtcag

SEQ ID NO: 32049 - DNA, 20 bp, Artificial Sequence
  Description of Artificial Sequence: Synthetic oligonucleotide
  Target: COL7A1; (+) strand; PAM type: YTN; PAM sequence: CTC
cggacctgaggtcagaggga

SEQ ID NO: 32050 - DNA, 20 bp, Artificial Sequence
  Description of Artificial Sequence: Synthetic oligonucleotide
  Target: COL7A1; (+) strand; PAM type: YTN; PAM sequence: CTG
aggtcagagggaaatgctgg

SEQ ID NO: 32051 - DNA, 20 bp, Artificial Sequence
  Description of Artificial Sequence: Synthetic oligonucleotide
  Target: COL7A1; (+) strand; PAM type: YTN; PAM sequence: CTG
gcatggctcctgcctgtccc

SEQ ID NO: 32052 - DNA, 20 bp, Artificial Sequence
  Description of Artificial Sequence: Synthetic oligonucleotide
  Target: COL7A1; (+) strand; PAM type: YTN; PAM sequence: CTC
ctgcctgtcccctctggcac

SEQ ID NO: 32053 - DNA, 20 bp, Artificial Sequence
  Description of Artificial Sequence: Synthetic oligonucleotide
  Target: COL7A1; (+) strand; PAM type: YTN; PAM sequence: CTG
cctgtcccctctggcaccca

SEQ ID NO: 32054 - DNA, 20 bp, Artificial Sequence
  Description of Artificial Sequence: Synthetic oligonucleotide
  Target: COL7A1; (+) strand; PAM type: YTN; PAM sequence: CTG
tcccctctggcacccatacc

SEQ ID NO: 32055 - DNA, 20 bp, Artificial Sequence
  Description of Artificial Sequence: Synthetic oligonucleotide
  Target: COL7A1; (+) strand; PAM type: YTN; PAM sequence: CTC
tggcacccataccctcattg

SEQ ID NO: 32056 - DNA, 20 bp, Artificial Sequence
  Description of Artificial Sequence: Synthetic oligonucleotide
  Target: COL7A1; (+) strand; PAM type: YTN; PAM sequence: CTG
gcacccataccctcattggt

SEQ ID NO: 32057 - DNA, 20 bp, Artificial Sequence
  Description of Artificial Sequence: Synthetic oligonucleotide
  Target: COL7A1; (+) strand; PAM type: YTN; PAM sequence: CTC
attggtccctttggcagtcc

SEQ ID NO: 32058 - DNA, 20 bp, Artificial Sequence
  Description of Artificial Sequence: Synthetic oligonucleotide
  Target: COL7A1; (+) strand; PAM type: YTN; PAM sequence: TTG
gtccctttggcagtcccccc

SEQ ID NO: 32059 - DNA, 20 bp, Artificial Sequence
  Description of Artificial Sequence: Synthetic oligonucleotide
  Target: COL7A1; (+) strand; PAM type: YTN; PAM sequence: CTT
tggcagtccccccacacacc

SEQ ID NO: 32060 - DNA, 20 bp, Artificial Sequence
  Description of Artificial Sequence: Synthetic oligonucleotide
  Target: COL7A1; (+) strand; PAM type: YTN; PAM sequence: TTT
ggcagtccccccacacaccc

SEQ ID NO: 32061 - DNA, 20 bp, Artificial Sequence
  Description of Artificial Sequence: Synthetic oligonucleotide
  Target: COL7A1; (+) strand; PAM type: YTN; PAM sequence: TTG
gcagtccccccacacacccc

SEQ ID NO: 32062 - DNA, 20 bp, Artificial Sequence
  Description of Artificial Sequence: Synthetic oligonucleotide
  Target: COL7A1; (+) strand; PAM type: YTN; PAM sequence: CTG
accactgcctgtgctccagc

SEQ ID NO: 32063 - DNA, 20 bp, Artificial Sequence
  Description of Artificial Sequence: Synthetic oligonucleotide
  Target: COL7A1; (+) strand; PAM type: YTN; PAM sequence: CTG
cctgtgctccagctaatccg

SEQ ID NO: 32064 - DNA, 20 bp, Artificial Sequence
  Description of Artificial Sequence: Synthetic oligonucleotide
  Target: COL7A1; (+) strand; PAM type: YTN; PAM sequence: CTG
tgctccagctaatccgaaat

SEQ ID NO: 32065 - DNA, 20 bp, Artificial Sequence
  Description of Artificial Sequence: Synthetic oligonucleotide
  Target: COL7A1; (+) strand; PAM type: YTN; PAM sequence: CTC
cagctaatccgaaatccact

SEQ ID NO: 32066 - DNA, 20 bp, Artificial Sequence
  Description of Artificial Sequence: Synthetic oligonucleotide
  Target: COL7A1; (+) strand; PAM type: YTN; PAM sequence: CTA
atccgaaatccactggctcc

SEQ ID NO: 32067 - DNA, 20 bp, Artificial Sequence
  Description of Artificial Sequence: Synthetic oligonucleotide
  Target: COL7A1; (+) strand; PAM type: YTN; PAM sequence: CTG
gctccagggacgggtcccca

SEQ ID NO: 32068 - DNA, 20 bp, Artificial Sequence
  Description of Artificial Sequence: Synthetic oligonucleotide
  Target: COL7A1; (+) strand; PAM type: YTN; PAM sequence: CTC
cagggacgggtccccaggcc

SEQ ID NO: 32069 - DNA, 20 bp, Artificial Sequence
  Description of Artificial Sequence: Synthetic oligonucleotide
  Target: COL7A1; (+) strand; PAM type: YTN; PAM sequence: CTC
actcgcgttgcatctgacac

SEQ ID NO: 32070 - DNA, 20 bp, Artificial Sequence
  Description of Artificial Sequence: Synthetic oligonucleotide
  Target: COL7A1; (+) strand; PAM type: YTN; PAM sequence: CTC
gcgttgcatctgacaccaca

SEQ ID NO: 32071 - DNA, 20 bp, Artificial Sequence
  Description of Artificial Sequence: Synthetic oligonucleotide
  Target: COL7A1; (+) strand; PAM type: YTN; PAM sequence: TTG
catctgacaccacaacccgc

SEQ ID NO: 32072 - DNA, 20 bp, Artificial Sequence
  Description of Artificial Sequence: Synthetic oligonucleotide
  Target: COL7A1; (+) strand; PAM type: YTN; PAM sequence: CTG
acaccacaacccgcagccct

SEQ ID NO: 32073 - DNA, 20 bp, Artificial Sequence
  Description of Artificial Sequence: Synthetic oligonucleotide
  Target: COL7A1; (+) strand; PAM type: YTN; PAM sequence: CTG
gaacagcaagtggagtttcc

SEQ ID NO: 32074 - DNA, 20 bp, Artificial Sequence
  Description of Artificial Sequence: Synthetic oligonucleotide
  Target: COL7A1; (+) strand; PAM type: YTN; PAM sequence: TTT
ccggctctaggagttacaga

SEQ ID NO: 32075 - DNA, 20 bp, Artificial Sequence
  Description of Artificial Sequence: Synthetic oligonucleotide
  Target: COL7A1; (+) strand; PAM type: YTN; PAM sequence: TTC
cggctctaggagttacagac

SEQ ID NO: 32076 - DNA, 20 bp, Artificial Sequence
  Description of Artificial Sequence: Synthetic oligonucleotide
  Target: COL7A1; (+) strand; PAM type: YTN; PAM sequence: CTC
taggagttacagacagaagt

SEQ ID NO: 32077 - DNA, 20 bp, Artificial Sequence
  Description of Artificial Sequence: Synthetic oligonucleotide
  Target: COL7A1; (+) strand; PAM type: YTN; PAM sequence: CTA
ggagttacagacagaagtca

SEQ ID NO: 32078 - DNA, 20 bp, Artificial Sequence
  Description of Artificial Sequence: Synthetic oligonucleotide
  Target: COL7A1; (+) strand; PAM type: YTN; PAM sequence: TTA
cagacagaagtcagaagtca

SEQ ID NO: 32079 - DNA, 20 bp, Artificial Sequence
  Description of Artificial Sequence: Synthetic oligonucleotide
  Target: COL7A1; (+) strand; PAM type: YTN; PAM sequence: CTG
tcctccacaagcctcctgca

SEQ ID NO: 32080 - DNA, 20 bp, Artificial Sequence
  Description of Artificial Sequence: Synthetic oligonucleotide
  Target: COL7A1; (+) strand; PAM type: YTN; PAM sequence: CTC
cacaagcctcctgcagtact

SEQ ID NO: 32081 - DNA, 20 bp, Artificial Sequence
  Description of Artificial Sequence: Synthetic oligonucleotide
  Target: COL7A1; (+) strand; PAM type: YTN; PAM sequence: CTC
ctgcagtactcaccccggcg

SEQ ID NO: 32082 - DNA, 20 bp, Artificial Sequence
  Description of Artificial Sequence: Synthetic oligonucleotide
  Target: COL7A1; (+) strand; PAM type: YTN; PAM sequence: CTG
cagtactcaccccggcggac

SEQ ID NO: 32083 - DNA, 20 bp, Artificial Sequence
  Description of Artificial Sequence: Synthetic oligonucleotide
  Target: COL7A1; (+) strand; PAM type: YTN; PAM sequence: CTC
accccggcggacagtgagga

SEQ ID NO: 32084 - DNA, 20 bp, Artificial Sequence
  Description of Artificial Sequence: Synthetic oligonucleotide
  Target: COL7A1; (+) strand; PAM type: YTN; PAM sequence: CTG
gcactgccctcacggggacc

SEQ ID NO: 32085 - DNA, 20 bp, Artificial Sequence
  Description of Artificial Sequence: Synthetic oligonucleotide
  Target: COL7A1; (+) strand; PAM type: YTN; PAM sequence: CTG
ccctcacggggacccactcg

SEQ ID NO: 32086 - DNA, 20 bp, Artificial Sequence
  Description of Artificial Sequence: Synthetic oligonucleotide
  Target: COL7A1; (+) strand; PAM type: YTN; PAM sequence: CTC
acggggacccactcgagcag

SEQ ID NO: 32087 - DNA, 20 bp, Artificial Sequence
  Description of Artificial Sequence: Synthetic oligonucleotide
  Target: COL7A1; (+) strand; PAM type: YTN; PAM sequence: CTC
gagcagacacccgcacagtg

SEQ ID NO: 32088 - DNA, 20 bp, Artificial Sequence
  Description of Artificial Sequence: Synthetic oligonucleotide
  Target: COL7A1; (+) strand; PAM type: YTN; PAM sequence: CTA
agcccagcctgaacgtcatc

SEQ ID NO: 32089 - DNA, 20 bp, Artificial Sequence
  Description of Artificial Sequence: Synthetic oligonucleotide
  Target: COL7A1; (+) strand; PAM type: YTN; PAM sequence: CTG
aacgtcatccaagtcgaatg

SEQ ID NO: 32090 - DNA, 20 bp, Artificial Sequence
  Description of Artificial Sequence: Synthetic oligonucleotide
  Target: COL7A1; (+) strand; PAM type: YTN; PAM sequence: CTG
tctgactcccaggaagcacc

SEQ ID NO: 32091 - DNA, 20 bp, Artificial Sequence
  Description of Artificial Sequence: Synthetic oligonucleotide
  Target: COL7A1; (+) strand; PAM type: YTN; PAM sequence: CTG
actcccaggaagcaccaggg

SEQ ID NO: 32092 - DNA, 20 bp, Artificial Sequence
  Description of Artificial Sequence: Synthetic oligonucleotide
  Target: COL7A1; (+) strand; PAM type: YTN; PAM sequence: CTC
ccaggaagcaccagggtccg

SEQ ID NO: 32093 - DNA, 20 bp, Artificial Sequence
  Description of Artificial Sequence: Synthetic oligonucleotide
  Target: COL7A1; (+) strand; PAM type: YTN; PAM sequence: CTC
aacccctaagagagaagtca

SEQ ID NO: 32094 - DNA, 20 bp, Artificial Sequence
  Description of Artificial Sequence: Synthetic oligonucleotide
  Target: COL7A1; (+) strand; PAM type: YTN; PAM sequence: CTA
agagagaagtcagggtaggt

SEQ ID NO: 32095 - DNA, 20 bp, Artificial Sequence
  Description of Artificial Sequence: Synthetic oligonucleotide
  Target: COL7A1; (+) strand; PAM type: YTN; PAM sequence: CTG
ggatatggctgaaaaaagtg

SEQ ID NO: 32096 - DNA, 20 bp, Artificial Sequence
  Description of Artificial Sequence: Synthetic oligonucleotide
  Target: COL7A1; (+) strand; PAM type: YTN; PAM sequence: CTG
aaaaaagtgagtgcaagaca

SEQ ID NO: 32097 - DNA, 20 bp, Artificial Sequence
  Description of Artificial Sequence: Synthetic oligonucleotide
  Target: COL7A1; (+) strand; PAM type: YTN; PAM sequence: CTG
gaggacaggagtctgtggga

SEQ ID NO: 32098 - DNA, 20 bp, Artificial Sequence
  Description of Artificial Sequence: Synthetic oligonucleotide
  Target: COL7A1; (+) strand; PAM type: YTN; PAM sequence: CTG
tgggatcttagcatgtagga

SEQ ID NO: 32099 - DNA, 20 bp, Artificial Sequence
  Description of Artificial Sequence: Synthetic oligonucleotide
  Target: COL7A1; (+) strand; PAM type: YTN; PAM sequence: CTT
agcatgtaggatgacaggag

SEQ ID NO: 32100 - DNA, 20 bp, Artificial Sequence
  Description of Artificial Sequence: Synthetic oligonucleotide
  Target: COL7A1; (+) strand; PAM type: YTN; PAM sequence: TTA
gcatgtaggatgacaggagt

SEQ ID NO: 32101 - DNA, 20 bp, Artificial Sequence
  Description of Artificial Sequence: Synthetic oligonucleotide
  Target: COL7A1; (+) strand; PAM type: YTN; PAM sequence: CTG
cagtgagaactgatgagcca

SEQ ID NO: 32102 - DNA, 20 bp, Artificial Sequence
  Description of Artificial Sequence: Synthetic oligonucleotide
  Target: COL7A1; (+) strand; PAM type: YTN; PAM sequence: CTG
atgagccattgacagacact

SEQ ID NO: 32103 - DNA, 20 bp, Artificial Sequence
  Description of Artificial Sequence: Synthetic oligonucleotide
  Target: COL7A1; (+) strand; PAM type: YTN; PAM sequence: TTG
acagacactgatgtgggatg

SEQ ID NO: 32104 - DNA, 20 bp, Artificial Sequence
  Description of Artificial Sequence: Synthetic oligonucleotide
  Target: COL7A1; (+) strand; PAM type: YTN; PAM sequence: CTG
atgtgggatggcagaggtca

SEQ ID NO: 32105 - DNA, 20 bp, Artificial Sequence
  Description of Artificial Sequence: Synthetic oligonucleotide
  Target: COL7A1; (+) strand; PAM type: YTN; PAM sequence: CTG
gatggggacatgcaatgaga

SEQ ID NO: 32106 - DNA, 20 bp, Artificial Sequence
  Description of Artificial Sequence: Synthetic oligonucleotide
  Target: COL7A1; (+) strand; PAM type: YTN; PAM sequence: TTG
gtgtacagtggtcaccacta

SEQ ID NO: 32107 - DNA, 20 bp, Artificial Sequence
  Description of Artificial Sequence: Synthetic oligonucleotide
  Target: COL7A1; (+) strand; PAM type: YTN; PAM sequence: CTA
gggtaacagaaagacaggtg

SEQ ID NO: 32108 - DNA, 20 bp, Artificial Sequence
  Description of Artificial Sequence: Synthetic oligonucleotide
  Target: COL7A1; (+) strand; PAM type: YTN; PAM sequence: TTG
agcttgtggctgtgcagagg

SEQ ID NO: 32109 - DNA, 20 bp, Artificial Sequence
  Description of Artificial Sequence: Synthetic oligonucleotide
  Target: COL7A1; (+) strand; PAM type: YTN; PAM sequence: CTT
gtggctgtgcagaggtgaaa

SEQ ID NO: 32110 - DNA, 20 bp, Artificial Sequence
  Description of Artificial Sequence: Synthetic oligonucleotide
  Target: COL7A1; (+) strand; PAM type: YTN; PAM sequence: TTG
tggctgtgcagaggtgaaag

SEQ ID NO: 32111 - DNA, 20 bp, Artificial Sequence
  Description of Artificial Sequence: Synthetic oligonucleotide
  Target: COL7A1; (+) strand; PAM type: YTN; PAM sequence: CTG
tgcagaggtgaaagccgtgg

SEQ ID NO: 32112 - DNA, 20 bp, Artificial Sequence
  Description of Artificial Sequence: Synthetic oligonucleotide
  Target: COL7A1; (+) strand; PAM type: YTN; PAM sequence: TTG
gttggggtagggtaggggca

SEQ ID NO: 32113 - DNA, 20 bp, Artificial Sequence
  Description of Artificial Sequence: Synthetic oligonucleotide
  Target: COL7A1; (+) strand; PAM type: YTN; PAM sequence: TTG
gggtagggtaggggcagaca

SEQ ID NO: 32114 - DNA, 20 bp, Artificial Sequence
  Description of Artificial Sequence: Synthetic oligonucleotide
  Target: COL7A1; (+) strand; PAM type: YTN; PAM sequence: CTG
ttgacagttcagggctcagt

SEQ ID NO: 32115 - DNA, 20 bp, Artificial Sequence
  Description of Artificial Sequence: Synthetic oligonucleotide
  Target: COL7A1; (+) strand; PAM type: YTN; PAM sequence: TTG
acagttcagggctcagtgcc

SEQ ID NO: 32116 - DNA, 20 bp, Artificial Sequence
  Description of Artificial Sequence: Synthetic oligonucleotide
  Target: COL7A1; (+) strand; PAM type: YTN; PAM sequence: TTC
agggctcagtgccatcttgg

SEQ ID NO: 32117 - DNA, 20 bp, Artificial Sequence
  Description of Artificial Sequence: Synthetic oligonucleotide
  Target: COL7A1; (+) strand; PAM type: YTN; PAM sequence: CTC
agtgccatcttgggaagcag

SEQ ID NO: 32118 - DNA, 20 bp, Artificial Sequence
  Description of Artificial Sequence: Synthetic oligonucleotide
  Target: COL7A1; (+) strand; PAM type: YTN; PAM sequence: CTT
gggaagcagatggataacga

SEQ ID NO: 32119 - DNA, 20 bp, Artificial Sequence
  Description of Artificial Sequence: Synthetic oligonucleotide
  Target: COL7A1; (+) strand; PAM type: YTN; PAM sequence: TTG
ggaagcagatggataacgag

SEQ ID NO: 32120 - DNA, 20 bp, Artificial Sequence
  Description of Artificial Sequence: Synthetic oligonucleotide
  Target: COL7A1; (+) strand; PAM type: YTN; PAM sequence: CTA
tagggacccaggtgtggaag

SEQ ID NO: 32121 - DNA, 20 bp, Artificial Sequence
  Description of Artificial Sequence: Synthetic oligonucleotide
  Target: COL7A1; (+) strand; PAM type: YTN; PAM sequence: CTG
gaggtacactcagacccctc

SEQ ID NO: 32122 - DNA, 20 bp, Artificial Sequence
  Description of Artificial Sequence: Synthetic oligonucleotide
  Target: COL7A1; (+) strand; PAM type: YTN; PAM sequence: CTC
agacccctcaggctggaact

SEQ ID NO: 32123 - DNA, 20 bp, Artificial Sequence
  Description of Artificial Sequence: Synthetic oligonucleotide
  Target: COL7A1; (+) strand; PAM type: YTN; PAM sequence: CTC
aggctggaacttcagtgtgt

SEQ ID NO: 32124 - DNA, 20 bp, Artificial Sequence
  Description of Artificial Sequence: Synthetic oligonucleotide
  Target: COL7A1; (+) strand; PAM type: YTN; PAM sequence: CTG
gaacttcagtgtgtgtggtg

SEQ ID NO: 32125 - DNA, 20 bp, Artificial Sequence
  Description of Artificial Sequence: Synthetic oligonucleotide
  Target: COL7A1; (+) strand; PAM type: YTN; PAM sequence: CTT
cagtgtgtgtggtgggggtg

SEQ ID NO: 32126 - DNA, 20 bp, Artificial Sequence
  Description of Artificial Sequence: Synthetic oligonucleotide
  Target: COL7A1; (+) strand; PAM type: YTN; PAM sequence: TTC
agtgtgtgtggtgggggtgc

SEQ ID NO: 32127 - DNA, 20 bp, Artificial Sequence
  Description of Artificial Sequence: Synthetic oligonucleotide
  Target: COL7A1; (+) strand; PAM type: YTN; PAM sequence: CTG
gctgcgtccacctcaccctg

SEQ ID NO: 32128 - DNA, 20 bp, Artificial Sequence
  Description of Artificial Sequence: Synthetic oligonucleotide
  Target: COL7A1; (+) strand; PAM type: YTN; PAM sequence: CTG
cgtccacctcaccctgggtg

SEQ ID NO: 32129 - DNA, 20 bp, Artificial Sequence
  Description of Artificial Sequence: Synthetic oligonucleotide
  Target: COL7A1; (+) strand; PAM type: YTN; PAM sequence: CTC
accctgggtgctgcgcacaa

SEQ ID NO: 32130 - DNA, 20 bp, Artificial Sequence
  Description of Artificial Sequence: Synthetic oligonucleotide
  Target: COL7A1; (+) strand; PAM type: YTN; PAM sequence: CTG
ggtgctgcgcacaatgatgc

SEQ ID NO: 32131 - DNA, 20 bp, Artificial Sequence
  Description of Artificial Sequence: Synthetic oligonucleotide
  Target: COL7A1; (+) strand; PAM type: YTN; PAM sequence: CTG
cgcacaatgatgcggtactg

SEQ ID NO: 32132 - DNA, 20 bp, Artificial Sequence
  Description of Artificial Sequence: Synthetic oligonucleotide
  Target: COL7A1; (+) strand; PAM type: YTN; PAM sequence: CTG
ggtggcaccagggactgggc

SEQ ID NO: 32133 - DNA, 20 bp, Artificial Sequence
  Description of Artificial Sequence: Synthetic oligonucleotide
  Target: COL7A1; (+) strand; PAM type: YTN; PAM sequence: CTG
ggctccaggacactcgcacc

SEQ ID NO: 32134 - DNA, 20 bp, Artificial Sequence
  Description of Artificial Sequence: Synthetic oligonucleotide
  Target: COL7A1; (+) strand; PAM type: YTN; PAM sequence: CTC
caggacactcgcacccgctg

SEQ ID NO: 32135 - DNA, 20 bp, Artificial Sequence
  Description of Artificial Sequence: Synthetic oligonucleotide
  Target: COL7A1; (+) strand; PAM type: YTN; PAM sequence: CTC
gcacccgctgcccgggcagc

SEQ ID NO: 32136 - DNA, 20 bp, Artificial Sequence
  Description of Artificial Sequence: Synthetic oligonucleotide
  Target: COL7A1; (+) strand; PAM type: YTN; PAM sequence: CTG
cccgggcagctcggtggctt

SEQ ID NO: 32137 - DNA, 20 bp, Artificial Sequence
  Description of Artificial Sequence: Synthetic oligonucleotide
  Target: COL7A1; (+) strand; PAM type: YTN; PAM sequence: CTC
ggtggcttgcaggtctgtta

SEQ ID NO: 32138 - DNA, 20 bp, Artificial Sequence
  Description of Artificial Sequence: Synthetic oligonucleotide
  Target: COL7A1; (+) strand; PAM type: YTN; PAM sequence: CTT
gcaggtctgttacagggctc

SEQ ID NO: 32139 - DNA, 20 bp, Artificial Sequence
  Description of Artificial Sequence: Synthetic oligonucleotide
  Target: COL7A1; (+) strand; PAM type: YTN; PAM sequence: TTG
caggtctgttacagggctca

SEQ ID NO: 32140 - DNA, 20 bp, Artificial Sequence
  Description of Artificial Sequence: Synthetic oligonucleotide
  Target: COL7A1; (+) strand; PAM type: YTN; PAM sequence: CTG
ttacagggctcacaggcagc

SEQ ID NO: 32141 - DNA, 20 bp, Artificial Sequence
  Description of Artificial Sequence: Synthetic oligonucleotide
  Target: COL7A1; (+) strand; PAM type: YTN; PAM sequence: TTA
cagggctcacaggcagctct

SEQ ID NO: 32142 - DNA, 20 bp, Artificial Sequence
  Description of Artificial Sequence: Synthetic oligonucleotide
  Target: COL7A1; (+) strand; PAM type: YTN; PAM sequence: CTC
acaggcagctctggtcctgt

SEQ ID NO: 32143 - DNA, 20 bp, Artificial Sequence
  Description of Artificial Sequence: Synthetic oligonucleotide
  Target: COL7A1; (+) strand; PAM type: YTN; PAM sequence: CTC
tggtcctgttggagagcaca

SEQ ID NO: 32144 - DNA, 20 bp, Artificial Sequence
  Description of Artificial Sequence: Synthetic oligonucleotide
  Target: COL7A1; (+) strand; PAM type: YTN; PAM sequence: CTG
gtcctgttggagagcacagc

SEQ ID NO: 32145 - DNA, 20 bp, Artificial Sequence
  Description of Artificial Sequence: Synthetic oligonucleotide
  Target: COL7A1; (+) strand; PAM type: YTN; PAM sequence: CTG
ttggagagcacagcatagag

SEQ ID NO: 32146 - DNA, 20 bp, Artificial Sequence
  Description of Artificial Sequence: Synthetic oligonucleotide
  Target: COL7A1; (+) strand; PAM type: YTN; PAM sequence: TTG
gagagcacagcatagaggca

SEQ ID NO: 32147 - DNA, 20 bp, Artificial Sequence
  Description of Artificial Sequence: Synthetic oligonucleotide
  Target: COL7A1; (+) strand; PAM type: YTN; PAM sequence: CTG
gggctccgacacctccccca

SEQ ID NO: 32148 - DNA, 20 bp, Artificial Sequence
  Description of Artificial Sequence: Synthetic oligonucleotide
  Target: COL7A1; (+) strand; PAM type: YTN; PAM sequence: CTC
cgacacctcccccactcact

SEQ ID NO: 32149 - DNA, 20 bp, Artificial Sequence
  Description of Artificial Sequence: Synthetic oligonucleotide
  Target: COL7A1; (+) strand; PAM type: YTN; PAM sequence: CTC
ccccactcactggcccagcc

SEQ ID NO: 32150 - DNA, 20 bp, Artificial Sequence
  Description of Artificial Sequence: Synthetic oligonucleotide
  Target: COL7A1; (+) strand; PAM type: YTN; PAM sequence: CTC
actggcccagcccacagagc

SEQ ID NO: 32151 - DNA, 20 bp, Artificial Sequence
  Description of Artificial Sequence: Synthetic oligonucleotide
  Target: COL7A1; (+) strand; PAM type: YTN; PAM sequence: CTG
gcccagcccacagagccctc

SEQ ID NO: 32152 - DNA, 20 bp, Artificial Sequence
  Description of Artificial Sequence: Synthetic oligonucleotide
  Target: COL7A1; (+) strand; PAM type: YTN; PAM sequence: CTC
accagtgggaaccacggttg

SEQ ID NO: 32153 - DNA, 20 bp, Artificial Sequence
  Description of Artificial Sequence: Synthetic oligonucleotide
  Target: COL7A1; (+) strand; PAM type: YTN; PAM sequence: TTG
caggggtggccacctcgtgg

SEQ ID NO: 32154 - DNA, 20 bp, Artificial Sequence
  Description of Artificial Sequence: Synthetic oligonucleotide
  Target: COL7A1; (+) strand; PAM type: YTN; PAM sequence: CTC
gtggccctccagcagagtgt

SEQ ID NO: 32155 - DNA, 20 bp, Artificial Sequence
  Description of Artificial Sequence: Synthetic oligonucleotide
  Target: COL7A1; (+) strand; PAM type: YTN; PAM sequence: CTC
cagcagagtgtagagtgtga

SEQ ID NO: 32156 - DNA, 20 bp, Artificial Sequence
  Description of Artificial Sequence: Synthetic oligonucleotide
  Target: COL7A1; (+) strand; PAM type: YTN; PAM sequence: CTC
agtgcccggctgcagcccat

SEQ ID NO: 32157 - DNA, 20 bp, Artificial Sequence
  Description of Artificial Sequence: Synthetic oligonucleotide
  Target: COL7A1; (+) strand; PAM type: YTN; PAM sequence: CTG
cagcccatccaactggtagc

SEQ ID NO: 32158 - DNA, 20 bp, Artificial Sequence
  Description of Artificial Sequence: Synthetic oligonucleotide
  Target: COL7A1; (+) strand; PAM type: YTN; PAM sequence: CTG
gtagcgggtcacatcagagg

SEQ ID NO: 32159 - DNA, 20 bp, Artificial Sequence
  Description of Artificial Sequence: Synthetic oligonucleotide
  Target: COL7A1; (+) strand; PAM type: YTN; PAM sequence: CTT
ctgcggtggctccaagcctg

SEQ ID NO: 32160 - DNA, 20 bp, Artificial Sequence
  Description of Artificial Sequence: Synthetic oligonucleotide
  Target: COL7A1; (+) strand; PAM type: YTN; PAM sequence: TTC
tgcggtggctccaagcctgc

SEQ ID NO: 32161 - DNA, 20 bp, Artificial Sequence
  Description of Artificial Sequence: Synthetic oligonucleotide
  Target: COL7A1; (+) strand; PAM type: YTN; PAM sequence: CTG
cggtggctccaagcctgcaa

SEQ ID NO: 32162 - DNA, 20 bp, Artificial Sequence
  Description of Artificial Sequence: Synthetic oligonucleotide
  Target: COL7A1; (+) strand; PAM type: YTN; PAM sequence: CTC
caagcctgcaagataacagg

SEQ ID NO: 32163 - DNA, 20 bp, Artificial Sequence
  Description of Artificial Sequence: Synthetic oligonucleotide
  Target: COL7A1; (+) strand; PAM type: YTN; PAM sequence: CTG
caagataacagggtcagacc

SEQ ID NO: 32164 - DNA, 20 bp, Artificial Sequence
  Description of Artificial Sequence: Synthetic oligonucleotide
  Target: COL7A1; (+) strand; PAM type: YTN; PAM sequence: CTG
acccttgcctgtccatccct

SEQ ID NO: 32165 - DNA, 20 bp, Artificial Sequence
  Description of Artificial Sequence: Synthetic oligonucleotide
  Target: COL7A1; (+) strand; PAM type: YTN; PAM sequence: CTT
gcctgtccatcccttccccc

SEQ ID NO: 32166 - DNA, 20 bp, Artificial Sequence
  Description of Artificial Sequence: Synthetic oligonucleotide
  Target: COL7A1; (+) strand; PAM type: YTN; PAM sequence: TTG
cctgtccatcccttcccccg

SEQ ID NO: 32167 - DNA, 20 bp, Artificial Sequence
  Description of Artificial Sequence: Synthetic oligonucleotide
  Target: COL7A1; (+) strand; PAM type: YTN; PAM sequence: CTG
tccatcccttcccccgcact

SEQ ID NO: 32168 - DNA, 20 bp, Artificial Sequence
  Description of Artificial Sequence: Synthetic oligonucleotide
  Target: COL7A1; (+) strand; PAM type: YTN; PAM sequence: CTT
cccccgcactgaccagtctc

SEQ ID NO: 32169 - DNA, 20 bp, Artificial Sequence
  Description of Artificial Sequence: Synthetic oligonucleotide
  Target: COL7A1; (+) strand; PAM type: YTN; PAM sequence: TTC
ccccgcactgaccagtctca

SEQ ID NO: 32170 - DNA, 20 bp, Artificial Sequence
  Description of Artificial Sequence: Synthetic oligonucleotide
  Target: COL7A1; (+) strand; PAM type: YTN; PAM sequence: CTG
accagtctcacgccgccatt

SEQ ID NO: 32171 - DNA, 20 bp, Artificial Sequence
  Description of Artificial Sequence: Synthetic oligonucleotide
  Target: COL7A1; (+) strand; PAM type: YTN; PAM sequence: CTC
acgccgccattccaaccggt

SEQ ID NO: 32172 - DNA, 20 bp, Artificial Sequence
  Description of Artificial Sequence: Synthetic oligonucleotide
  Target: COL7A1; (+) strand; PAM type: YTN; PAM sequence: TTC
caaccggtagccacgggcct

SEQ ID NO: 32173 - DNA, 20 bp, Artificial Sequence
  Description of Artificial Sequence: Synthetic oligonucleotide
  Target: COL7A1; (+) strand; PAM type: YTN; PAM sequence: CTC
aggcaccaagttccaggaaa

SEQ ID NO: 32174 - DNA, 20 bp, Artificial Sequence
  Description of Artificial Sequence: Synthetic oligonucleotide
  Target: COL7A1; (+) strand; PAM type: YTN; PAM sequence: TTC
caggaaaggaggatggatgt

SEQ ID NO: 32175 - DNA, 20 bp, Artificial Sequence
  Description of Artificial Sequence: Synthetic oligonucleotide
  Target: COL7A1; (+) strand; PAM type: YTN; PAM sequence: CTG
ctcaacagaagcgtctgccc

SEQ ID NO: 32176 - DNA, 20 bp, Artificial Sequence
  Description of Artificial Sequence: Synthetic oligonucleotide
  Target: COL7A1; (+) strand; PAM type: YTN; PAM sequence: CTC
aacagaagcgtctgcccagg

SEQ ID NO: 32177 - DNA, 20 bp, Artificial Sequence
  Description of Artificial Sequence: Synthetic oligonucleotide
  Target: COL7A1; (+) strand; PAM type: YTN; PAM sequence: CTG
cccagggcacatgggatgtc

SEQ ID NO: 32178 - DNA, 20 bp, Artificial Sequence
  Description of Artificial Sequence: Synthetic oligonucleotide
  Target: COL7A1; (+) strand; PAM type: YTN; PAM sequence: CTC
cgggccttgccctgcctgcc

SEQ ID NO: 32179 - DNA, 20 bp, Artificial Sequence
  Description of Artificial Sequence: Synthetic oligonucleotide
  Target: COL7A1; (+) strand; PAM type: YTN; PAM sequence: CTT
gccctgcctgcccgtcccag

SEQ ID NO: 32180 - DNA, 20 bp, Artificial Sequence
  Description of Artificial Sequence: Synthetic oligonucleotide
  Target: COL7A1; (+) strand; PAM type: YTN; PAM sequence: TTG
ccctgcctgcccgtcccagc

SEQ ID NO: 32181 - DNA, 20 bp, Artificial Sequence
  Description of Artificial Sequence: Synthetic oligonucleotide
  Target: COL7A1; (+) strand; PAM type: YTN; PAM sequence: CTG
cctgcccgtcccagcctgaa

SEQ ID NO: 32182 - DNA, 20 bp, Artificial Sequence
  Description of Artificial Sequence: Synthetic oligonucleotide
  Target: COL7A1; (+) strand; PAM type: YTN; PAM sequence: CTG
cccgtcccagcctgaagaaa

SEQ ID NO: 32183 - DNA, 20 bp, Artificial Sequence
  Description of Artificial Sequence: Synthetic oligonucleotide
  Target: COL7A1; (+) strand; PAM type: YTN; PAM sequence: CTG
aagaaagtgcccagccttct

SEQ ID NO: 32184 - DNA, 20 bp, Artificial Sequence
  Description of Artificial Sequence: Synthetic oligonucleotide
  Target: COL7A1; (+) strand; PAM type: YTN; PAM sequence: CTT
ctcaccagtgcgagccatca

SEQ ID NO: 32185 - DNA, 20 bp, Artificial Sequence
  Description of Artificial Sequence: Synthetic oligonucleotide
  Target: COL7A1; (+) strand; PAM type: YTN; PAM sequence: TTC
tcaccagtgcgagccatcag

SEQ ID NO: 32186 - DNA, 20 bp, Artificial Sequence
  Description of Artificial Sequence: Synthetic oligonucleotide
  Target: COL7A1; (+) strand; PAM type: YTN; PAM sequence: CTC
accagtgcgagccatcaggg

SEQ ID NO: 32187 - DNA, 20 bp, Artificial Sequence
  Description of Artificial Sequence: Synthetic oligonucleotide
  Target: COL7A1; (+) strand; PAM type: YTN; PAM sequence: CTG
cggccaaatagggtgctcac

SEQ ID NO: 32188 - DNA, 20 bp, Artificial Sequence
  Description of Artificial Sequence: Synthetic oligonucleotide
  Target: COL7A1; (+) strand; PAM type: YTN; PAM sequence: CTC
acggtcacctcatagtccgt

SEQ ID NO: 32189 - DNA, 20 bp, Artificial Sequence
  Description of Artificial Sequence: Synthetic oligonucleotide
  Target: COL7A1; (+) strand; PAM type: YTN; PAM sequence: CTC
atagtccgtgccaggctcca

SEQ ID NO: 32190 - DNA, 20 bp, Artificial Sequence
  Description of Artificial Sequence: Synthetic oligonucleotide
  Target: COL7A1; (+) strand; PAM type: YTN; PAM sequence: CTC
caagtcacgcagcaacactg

SEQ ID NO: 32191 - DNA, 20 bp, Artificial Sequence
  Description of Artificial Sequence: Synthetic oligonucleotide
  Target: COL7A1; (+) strand; PAM type: YTN; PAM sequence: CTG
aaccctgcccagggcccagc

SEQ ID NO: 32192 - DNA, 20 bp, Artificial Sequence
  Description of Artificial Sequence: Synthetic oligonucleotide
  Target: COL7A1; (+) strand; PAM type: YTN; PAM sequence: CTG
cccagggcccagctcctgct

SEQ ID NO: 32193 - DNA, 20 bp, Artificial Sequence
  Description of Artificial Sequence: Synthetic oligonucleotide
  Target: COL7A1; (+) strand; PAM type: YTN; PAM sequence: CTC
ctgctgctgtgtgggcccac

SEQ ID NO: 32194 - DNA, 20 bp, Artificial Sequence
  Description of Artificial Sequence: Synthetic oligonucleotide
  Target: COL7A1; (+) strand; PAM type: YTN; PAM sequence: CTG
ctgctgtgtgggcccacctg

SEQ ID NO: 32195 - DNA, 20 bp, Artificial Sequence
  Description of Artificial Sequence: Synthetic oligonucleotide
  Target: COL7A1; (+) strand; PAM type: YTN; PAM sequence: CTG
ctgtgtgggcccacctgcat

SEQ ID NO: 32196 - DNA, 20 bp, Artificial Sequence
  Description of Artificial Sequence: Synthetic oligonucleotide
  Target: COL7A1; (+) strand; PAM type: YTN; PAM sequence: CTG
tgtgggcccacctgcatggg

SEQ ID NO: 32197 - DNA, 20 bp, Artificial Sequence
  Description of Artificial Sequence: Synthetic oligonucleotide
  Target: COL7A1; (+) strand; PAM type: YTN; PAM sequence: CTG
catgggggacaccaaggggc

SEQ ID NO: 32198 - DNA, 20 bp, Artificial Sequence
  Description of Artificial Sequence: Synthetic oligonucleotide
  Target: COL7A1; (+) strand; PAM type: YTN; PAM sequence: CTT
gcagactcaggactctacag

SEQ ID NO: 32199 - DNA, 20 bp, Artificial Sequence
  Description of Artificial Sequence: Synthetic oligonucleotide
  Target: COL7A1; (+) strand; PAM type: YTN; PAM sequence: TTG
cagactcaggactctacagc

SEQ ID NO: 32200 - DNA, 20 bp, Artificial Sequence
  Description of Artificial Sequence: Synthetic oligonucleotide
  Target: COL7A1; (+) strand; PAM type: YTN; PAM sequence: CTC
aggactctacagccttgtct

SEQ ID NO: 32201 - DNA, 20 bp, Artificial Sequence
  Description of Artificial Sequence: Synthetic oligonucleotide
  Target: COL7A1; (+) strand; PAM type: YTN; PAM sequence: CTC
tacagccttgtctgaggcgc

SEQ ID NO: 32202 - DNA, 20 bp, Artificial Sequence
  Description of Artificial Sequence: Synthetic oligonucleotide
  Target: COL7A1; (+) strand; PAM type: YTN; PAM sequence: CTA
cagccttgtctgaggcgcgg

SEQ ID NO: 32203 - DNA, 20 bp, Artificial Sequence
  Description of Artificial Sequence: Synthetic oligonucleotide
  Target: COL7A1; (+) strand; PAM type: YTN; PAM sequence: CTT
gtctgaggcgcggggactcc

SEQ ID NO: 32204 - DNA, 20 bp, Artificial Sequence
  Description of Artificial Sequence: Synthetic oligonucleotide
  Target: COL7A1; (+) strand; PAM type: YTN; PAM sequence: TTG
tctgaggcgcggggactccc

SEQ ID NO: 32205 - DNA, 20 bp, Artificial Sequence
  Description of Artificial Sequence: Synthetic oligonucleotide
  Target: COL7A1; (+) strand; PAM type: YTN; PAM sequence: CTG
aggcgcggggactcccctca

SEQ ID NO: 32206 - DNA, 20 bp, Artificial Sequence
  Description of Artificial Sequence: Synthetic oligonucleotide
  Target: COL7A1; (+) strand; PAM type: YTN; PAM sequence: CTC
ccctcagcccacatctctca

SEQ ID NO: 32207 - DNA, 20 bp, Artificial Sequence
  Description of Artificial Sequence: Synthetic oligonucleotide
  Target: COL7A1; (+) strand; PAM type: YTN; PAM sequence: CTC
agcccacatctctcactcac

SEQ ID NO: 32208 - DNA, 20 bp, Artificial Sequence
  Description of Artificial Sequence: Synthetic oligonucleotide
  Target: COL7A1; (+) strand; PAM type: YTN; PAM sequence: CTC
tcactcaccactgaggaccc

SEQ ID NO: 32209 - DNA, 20 bp, Artificial Sequence
  Description of Artificial Sequence: Synthetic oligonucleotide
  Target: COL7A1; (+) strand; PAM type: YTN; PAM sequence: CTC
actcaccactgaggacccgc

SEQ ID NO: 32210 - DNA, 20 bp, Artificial Sequence
  Description of Artificial Sequence: Synthetic oligonucleotide
  Target: COL7A1; (+) strand; PAM type: YTN; PAM sequence: CTC
accactgaggacccgccatg

SEQ ID NO: 32211 - DNA, 20 bp, Artificial Sequence
  Description of Artificial Sequence: Synthetic oligonucleotide
  Target: COL7A1; (+) strand; PAM type: YTN; PAM sequence: CTG
aggacccgccatgtcacacg

SEQ ID NO: 32212 - DNA, 20 bp, Artificial Sequence
  Description of Artificial Sequence: Synthetic oligonucleotide
  Target: COL7A1; (+) strand; PAM type: YTN; PAM sequence: CTG
gcacactccgccaggccacc

SEQ ID NO: 32213 - DNA, 20 bp, Artificial Sequence
  Description of Artificial Sequence: Synthetic oligonucleotide
  Target: COL7A1; (+) strand; PAM type: YTN; PAM sequence: CTC
cgccaggccaccaggaggct

SEQ ID NO: 32214 - DNA, 20 bp, Artificial Sequence
  Description of Artificial Sequence: Synthetic oligonucleotide
  Target: COL7A1; (+) strand; PAM type: YTN; PAM sequence: CTG
tgggctgtggtattctggat

SEQ ID NO: 32215 - DNA, 20 bp, Artificial Sequence
  Description of Artificial Sequence: Synthetic oligonucleotide
  Target: COL7A1; (+) strand; PAM type: YTN; PAM sequence: CTG
tggtattctggatggtcagt

SEQ ID NO: 32216 - DNA, 20 bp, Artificial Sequence
  Description of Artificial Sequence: Synthetic oligonucleotide
  Target: COL7A1; (+) strand; PAM type: YTN; PAM sequence: TTC
tggatggtcagttccggccc

SEQ ID NO: 32217 - DNA, 20 bp, Artificial Sequence
  Description of Artificial Sequence: Synthetic oligonucleotide
  Target: COL7A1; (+) strand; PAM type: YTN; PAM sequence: CTG
gatggtcagttccggccctt

SEQ ID NO: 32218 - DNA, 20 bp, Artificial Sequence
  Description of Artificial Sequence: Synthetic oligonucleotide
  Target: COL7A1; (+) strand; PAM type: YTN; PAM sequence: TTC
cggcccttctagggcagctg

SEQ ID NO: 32219 - DNA, 20 bp, Artificial Sequence
  Description of Artificial Sequence: Synthetic oligonucleotide
  Target: COL7A1; (+) strand; PAM type: YTN; PAM sequence: CTT
ctagggcagctgggggagag

SEQ ID NO: 32220 - DNA, 20 bp, Artificial Sequence
  Description of Artificial Sequence: Synthetic oligonucleotide
  Target: COL7A1; (+) strand; PAM type: YTN; PAM sequence: TTC
tagggcagctgggggagagt

SEQ ID NO: 32221 - DNA, 20 bp, Artificial Sequence
  Description of Artificial Sequence: Synthetic oligonucleotide
  Target: COL7A1; (+) strand; PAM type: YTN; PAM sequence: CTA
gggcagctgggggagagtcc

SEQ ID NO: 32222 - DNA, 20 bp, Artificial Sequence
  Description of Artificial Sequence: Synthetic oligonucleotide
  Target: COL7A1; (+) strand; PAM type: YTN; PAM sequence: CTG
ggggagagtcccaccaggga

SEQ ID NO: 32223 - DNA, 20 bp, Artificial Sequence
  Description of Artificial Sequence: Synthetic oligonucleotide
  Target: COL7A1; (+) strand; PAM type: YTN; PAM sequence: TTC
atggagtcagaagtgggagg

SEQ ID NO: 32224 - DNA, 20 bp, Artificial Sequence
  Description of Artificial Sequence: Synthetic oligonucleotide
  Target: COL7A1; (+) strand; PAM type: YTN; PAM sequence: CTG
gggtcgggggttaggtgaat

SEQ ID NO: 32225 - DNA, 20 bp, Artificial Sequence
  Description of Artificial Sequence: Synthetic oligonucleotide
  Target: COL7A1; (+) strand; PAM type: YTN; PAM sequence: TTA
ggtgaatggggtcagaggct

SEQ ID NO: 32226 - DNA, 20 bp, Artificial Sequence
  Description of Artificial Sequence: Synthetic oligonucleotide
  Target: COL7A1; (+) strand; PAM type: YTN; PAM sequence: CTG
gcagaattgctcactggtcc

SEQ ID NO: 32227 - DNA, 20 bp, Artificial Sequence
  Description of Artificial Sequence: Synthetic oligonucleotide
  Target: COL7A1; (+) strand; PAM type: YTN; PAM sequence: TTG
ctcactggtccgagctgtcc

SEQ ID NO: 32228 - DNA, 20 bp, Artificial Sequence
  Description of Artificial Sequence: Synthetic oligonucleotide
  Target: COL7A1; (+) strand; PAM type: YTN; PAM sequence: CTC
actggtccgagctgtcccgc

SEQ ID NO: 32229 - DNA, 20 bp, Artificial Sequence
  Description of Artificial Sequence: Synthetic oligonucleotide
  Target: COL7A1; (+) strand; PAM type: YTN; PAM sequence: CTG
gtccgagctgtcccgctcac

SEQ ID NO: 32230 - DNA, 20 bp, Artificial Sequence
  Description of Artificial Sequence: Synthetic oligonucleotide
  Target: COL7A1; (+) strand; PAM type: YTN; PAM sequence: CTG
tcccgctcacagcctccccg

SEQ ID NO: 32231 - DNA, 20 bp, Artificial Sequence
  Description of Artificial Sequence: Synthetic oligonucleotide
  Target: COL7A1; (+) strand; PAM type: YTN; PAM sequence: CTC
acagcctccccgatgctgtt

SEQ ID NO: 32232 - DNA, 20 bp, Artificial Sequence
  Description of Artificial Sequence: Synthetic oligonucleotide
  Target: COL7A1; (+) strand; PAM type: YTN; PAM sequence: CTC
cccgatgctgttggcgtaga

SEQ ID NO: 32233 - DNA, 20 bp, Artificial Sequence
  Description of Artificial Sequence: Synthetic oligonucleotide
  Target: COL7A1; (+) strand; PAM type: YTN; PAM sequence: CTG
ttggcgtagagggcaatcac

SEQ ID NO: 32234 - DNA, 20 bp, Artificial Sequence
  Description of Artificial Sequence: Synthetic oligonucleotide
  Target: COL7A1; (+) strand; PAM type: YTN; PAM sequence: TTG
gcgtagagggcaatcacagt

SEQ ID NO: 32235 - DNA, 20 bp, Artificial Sequence
  Description of Artificial Sequence: Synthetic oligonucleotide
  Target: COL7A1; (+) strand; PAM type: YTN; PAM sequence: CTT
ggtactcggtcagtggccgg

SEQ ID NO: 32236 - DNA, 20 bp, Artificial Sequence
  Description of Artificial Sequence: Synthetic oligonucleotide
  Target: COL7A1; (+) strand; PAM type: YTN; PAM sequence: TTG
gtactcggtcagtggccgga

SEQ ID NO: 32237 - DNA, 20 bp, Artificial Sequence
  Description of Artificial Sequence: Synthetic oligonucleotide
  Target: COL7A1; (+) strand; PAM type: YTN; PAM sequence: CTC
ggtcagtggccggagacccc

SEQ ID NO: 32238 - DNA, 20 bp, Artificial Sequence
  Description of Artificial Sequence: Synthetic oligonucleotide
  Target: COL7A1; (+) strand; PAM type: YTN; PAM sequence: CTG
gtctcaccagctgggacgtt

SEQ ID NO: 32239 - DNA, 20 bp, Artificial Sequence
  Description of Artificial Sequence: Synthetic oligonucleotide
  Target: COL7A1; (+) strand; PAM type: YTN; PAM sequence: CTC
accagctgggacgttcacct

SEQ ID NO: 32240 - DNA, 20 bp, Artificial Sequence
  Description of Artificial Sequence: Synthetic oligonucleotide
  Target: COL7A1; (+) strand; PAM type: YTN; PAM sequence: CTG
ggacgttcacctgcccaggg

SEQ ID NO: 32241 - DNA, 20 bp, Artificial Sequence
  Description of Artificial Sequence: Synthetic oligonucleotide
  Target: COL7A1; (+) strand; PAM type: YTN; PAM sequence: TTC
acctgcccagggcaagaggt

SEQ ID NO: 32242 - DNA, 20 bp, Artificial Sequence
  Description of Artificial Sequence: Synthetic oligonucleotide
  Target: COL7A1; (+) strand; PAM type: YTN; PAM sequence: CTG
cccagggcaagaggtcactt

SEQ ID NO: 32243 - DNA, 20 bp, Artificial Sequence
  Description of Artificial Sequence: Synthetic oligonucleotide
  Target: COL7A1; (+) strand; PAM type: YTN; PAM sequence: CTT
tatcttgcccagccaagtcc

SEQ ID NO: 32244 - DNA, 20 bp, Artificial Sequence
  Description of Artificial Sequence: Synthetic oligonucleotide
  Target: COL7A1; (+) strand; PAM type: YTN; PAM sequence: TTT
atcttgcccagccaagtccc

SEQ ID NO: 32245 - DNA, 20 bp, Artificial Sequence
  Description of Artificial Sequence: Synthetic oligonucleotide
  Target: COL7A1; (+) strand; PAM type: YTN; PAM sequence: TTA
tcttgcccagccaagtcccc

SEQ ID NO: 32246 - DNA, 20 bp, Artificial Sequence
  Description of Artificial Sequence: Synthetic oligonucleotide
  Target: COL7A1; (+) strand; PAM type: YTN; PAM sequence: CTT
gcccagccaagtccccagcc

SEQ ID NO: 32247 - DNA, 20 bp, Artificial Sequence
  Description of Artificial Sequence: Synthetic oligonucleotide
  Target: COL7A1; (+) strand; PAM type: YTN; PAM sequence: TTG
cccagccaagtccccagcca

SEQ ID NO: 32248 - DNA, 20 bp, Artificial Sequence
  Description of Artificial Sequence: Synthetic oligonucleotide
  Target: COL7A1; (+) strand; PAM type: YTN; PAM sequence: CTA
tcactcctgacatcctacct

SEQ ID NO: 32249 - DNA, 20 bp, Artificial Sequence
  Description of Artificial Sequence: Synthetic oligonucleotide
  Target: COL7A1; (+) strand; PAM type: YTN; PAM sequence: CTC
ctgacatcctacctcctgcc

SEQ ID NO: 32250 - DNA, 20 bp, Artificial Sequence
  Description of Artificial Sequence: Synthetic oligonucleotide
  Target: COL7A1; (+) strand; PAM type: YTN; PAM sequence: CTG
acatcctacctcctgccgct

SEQ ID NO: 32251 - DNA, 20 bp, Artificial Sequence
  Description of Artificial Sequence: Synthetic oligonucleotide
  Target: COL7A1; (+) strand; PAM type: YTN; PAM sequence: CTA
cctcctgccgctcactcggc

SEQ ID NO: 32252 - DNA, 20 bp, Artificial Sequence
  Description of Artificial Sequence: Synthetic oligonucleotide
  Target: COL7A1; (+) strand; PAM type: YTN; PAM sequence: CTC
ctgccgctcactcggcagtg

SEQ ID NO: 32253 - DNA, 20 bp, Artificial Sequence
  Description of Artificial Sequence: Synthetic oligonucleotide
  Target: COL7A1; (+) strand; PAM type: YTN; PAM sequence: CTG
ccgctcactcggcagtggct

SEQ ID NO: 32254 - DNA, 20 bp, Artificial Sequence
  Description of Artificial Sequence: Synthetic oligonucleotide
  Target: COL7A1; (+) strand; PAM type: YTN; PAM sequence: CTC
actcggcagtggctgtccca

SEQ ID NO: 32255 - DNA, 20 bp, Artificial Sequence
  Description of Artificial Sequence: Synthetic oligonucleotide
  Target: COL7A1; (+) strand; PAM type: YTN; PAM sequence: CTC
ggcagtggctgtcccagccc

SEQ ID NO: 32256 - DNA, 20 bp, Artificial Sequence
  Description of Artificial Sequence: Synthetic oligonucleotide
  Target: COL7A1; (+) strand; PAM type: YTN; PAM sequence: CTG
tcccagccccgtcagaggag

SEQ ID NO: 32257 - DNA, 20 bp, Artificial Sequence
  Description of Artificial Sequence: Synthetic oligonucleotide
  Target: COL7A1; (+) strand; PAM type: YTN; PAM sequence: CTG
gaccttgtagccagtcacag

SEQ ID NO: 32258 - DNA, 20 bp, Artificial Sequence
  Description of Artificial Sequence: Synthetic oligonucleotide
  Target: COL7A1; (+) strand; PAM type: YTN; PAM sequence: CTT
gtagccagtcacagggccac

SEQ ID NO: 32259 - DNA, 20 bp, Artificial Sequence
  Description of Artificial Sequence: Synthetic oligonucleotide
  Target: COL7A1; (+) strand; PAM type: YTN; PAM sequence: TTG
tagccagtcacagggccact

SEQ ID NO: 32260 - DNA, 20 bp, Artificial Sequence
  Description of Artificial Sequence: Synthetic oligonucleotide
  Target: COL7A1; (+) strand; PAM type: YTN; PAM sequence: CTG
gccgctgtccactgtactct

SEQ ID NO: 32261 - DNA, 20 bp, Artificial Sequence
  Description of Artificial Sequence: Synthetic oligonucleotide
  Target: COL7A1; (+) strand; PAM type: YTN; PAM sequence: CTG
tccactgtactctcaaggat

SEQ ID NO: 32262 - DNA, 20 bp, Artificial Sequence
  Description of Artificial Sequence: Synthetic oligonucleotide
  Target: COL7A1; (+) strand; PAM type: YTN; PAM sequence: CTG
tactctcaaggattggctgc

SEQ ID NO: 32263 - DNA, 20 bp, Artificial Sequence
  Description of Artificial Sequence: Synthetic oligonucleotide
  Target: COL7A1; (+) strand; PAM type: YTN; PAM sequence: CTC
tcaaggattggctgcttggc

SEQ ID NO: 32264 - DNA, 20 bp, Artificial Sequence
  Description of Artificial Sequence: Synthetic oligonucleotide
  Target: COL7A1; (+) strand; PAM type: YTN; PAM sequence: CTC
aaggattggctgcttggctc

SEQ ID NO: 32265 - DNA, 20 bp, Artificial Sequence
  Description of Artificial Sequence: Synthetic oligonucleotide
  Target: COL7A1; (+) strand; PAM type: YTN; PAM sequence: TTG
gctgcttggctcagacagca

SEQ ID NO: 32266 - DNA, 20 bp, Artificial Sequence
  Description of Artificial Sequence: Synthetic oligonucleotide
  Target: COL7A1; (+) strand; PAM type: YTN; PAM sequence: CTG
cttggctcagacagcaccag

SEQ ID NO: 32267 - DNA, 20 bp, Artificial Sequence
  Description of Artificial Sequence: Synthetic oligonucleotide
  Target: COL7A1; (+) strand; PAM type: YTN; PAM sequence: CTT
ggctcagacagcaccaggtc

SEQ ID NO: 32268 - DNA, 20 bp, Artificial Sequence
  Description of Artificial Sequence: Synthetic oligonucleotide
  Target: COL7A1; (+) strand; PAM type: YTN; PAM sequence: TTG
gctcagacagcaccaggtct

SEQ ID NO: 32269 - DNA, 20 bp, Artificial Sequence
  Description of Artificial Sequence: Synthetic oligonucleotide
  Target: COL7A1; (+) strand; PAM type: YTN; PAM sequence: CTC
agacagcaccaggtctcgtg

SEQ ID NO: 32270 - DNA, 20 bp, Artificial Sequence
  Description of Artificial Sequence: Synthetic oligonucleotide
  Target: COL7A1; (+) strand; PAM type: YTN; PAM sequence: CTC
gtggagcagaggtcgagtca

SEQ ID NO: 32271 - DNA, 20 bp, Artificial Sequence
  Description of Artificial Sequence: Synthetic oligonucleotide
  Target: COL7A1; (+) strand; PAM type: YTN; PAM sequence: CTG
ggaatgcgggatcaggggat

SEQ ID NO: 32272 - DNA, 20 bp, Artificial Sequence
  Description of Artificial Sequence: Synthetic oligonucleotide
  Target: COL7A1; (+) strand; PAM type: YTN; PAM sequence: TTG
gggtgggcatgtatgatgca

SEQ ID NO: 32273 - DNA, 20 bp, Artificial Sequence
  Description of Artificial Sequence: Synthetic oligonucleotide
  Target: COL7A1; (+) strand; PAM type: YTN; PAM sequence: TTG
gggtcggggtcaggagcaca

SEQ ID NO: 32274 - DNA, 20 bp, Artificial Sequence
  Description of Artificial Sequence: Synthetic oligonucleotide
  Target: COL7A1; (+) strand; PAM type: YTN; PAM sequence: CTG
ccaagtggggattggggtcc

SEQ ID NO: 32275 - DNA, 20 bp, Artificial Sequence
  Description of Artificial Sequence: Synthetic oligonucleotide
  Target: COL7A1; (+) strand; PAM type: YTN; PAM sequence: TTG
gggtccggggtctaggtcag

SEQ ID NO: 32276 - DNA, 20 bp, Artificial Sequence
  Description of Artificial Sequence: Synthetic oligonucleotide
  Target: COL7A1; (+) strand; PAM type: YTN; PAM sequence: CTA
ggtcagggtacaccgtgtgg

SEQ ID NO: 32277 - DNA, 20 bp, Artificial Sequence
  Description of Artificial Sequence: Synthetic oligonucleotide
  Target: COL7A1; (+) strand; PAM type: YTN; PAM sequence: CTC
acgaggtcgggtcacaggca

SEQ ID NO: 32278 - DNA, 20 bp, Artificial Sequence
  Description of Artificial Sequence: Synthetic oligonucleotide
  Target: COL7A1; (+) strand; PAM type: YTN; PAM sequence: CTC
tccgggaaacgaggggcagt

SEQ ID NO: 32279 - DNA, 20 bp, Artificial Sequence
  Description of Artificial Sequence: Synthetic oligonucleotide
  Target: COL7A1; (+) strand; PAM type: YTN; PAM sequence: CTC
cgggaaacgaggggcagtag

SEQ ID NO: 32280 - DNA, 20 bp, Artificial Sequence
  Description of Artificial Sequence: Synthetic oligonucleotide
  Target: COL7A1; (+) strand; PAM type: YTN; PAM sequence: CTC
aagatgctgaagtcattgac

SEQ ID NO: 32281 - DNA, 20 bp, Artificial Sequence
  Description of Artificial Sequence: Synthetic oligonucleotide
  Target: COL7A1; (+) strand; PAM type: YTN; PAM sequence: CTG
aagtcattgacgaagaagaa

SEQ ID NO: 32282 - DNA, 20 bp, Artificial Sequence
  Description of Artificial Sequence: Synthetic oligonucleotide
  Target: COL7A1; (+) strand; PAM type: YTN; PAM sequence: TTG
acgaagaagaagaagtcact

SEQ ID NO: 32283 - DNA, 20 bp, Artificial Sequence
  Description of Artificial Sequence: Synthetic oligonucleotide
  Target: COL7A1; (+) strand; PAM type: YTN; PAM sequence: CTG
gtgggctgtgaggcaactcg

SEQ ID NO: 32284 - DNA, 20 bp, Artificial Sequence
  Description of Artificial Sequence: Synthetic oligonucleotide
  Target: COL7A1; (+) strand; PAM type: YTN; PAM sequence: CTG
tgaggcaactcgcttcagct

SEQ ID NO: 32285 - DNA, 20 bp, Artificial Sequence
  Description of Artificial Sequence: Synthetic oligonucleotide
  Target: COL7A1; (+) strand; PAM type: YTN; PAM sequence: CTC
gcttcagctcctcagggtca

SEQ ID NO: 32286 - DNA, 20 bp, Artificial Sequence
  Description of Artificial Sequence: Synthetic oligonucleotide
  Target: COL7A1; (+) strand; PAM type: YTN; PAM sequence: CTT
cagctcctcagggtcagcat

SEQ ID NO: 32287 - DNA, 20 bp, Artificial Sequence
  Description of Artificial Sequence: Synthetic oligonucleotide
  Target: COL7A1; (+) strand; PAM type: YTN; PAM sequence: TTC
agctcctcagggtcagcatt

SEQ ID NO: 32288 - DNA, 20 bp, Artificial Sequence
  Description of Artificial Sequence: Synthetic oligonucleotide
  Target: COL7A1; (+) strand; PAM type: YTN; PAM sequence: CTC
ctcagggtcagcattcttga

SEQ ID NO: 32289 - DNA, 20 bp, Artificial Sequence
  Description of Artificial Sequence: Synthetic oligonucleotide
  Target: COL7A1; (+) strand; PAM type: YTN; PAM sequence: CTC
agggtcagcattcttgatcc

SEQ ID NO: 32290 - DNA, 20 bp, Artificial Sequence
  Description of Artificial Sequence: Synthetic oligonucleotide
  Target: COL7A1; (+) strand; PAM type: YTN; PAM sequence: TTC
ttgatccctgaagtgacgac

SEQ ID NO: 32291 - DNA, 20 bp, Artificial Sequence
  Description of Artificial Sequence: Synthetic oligonucleotide
  Target: COL7A1; (+) strand; PAM type: YTN; PAM sequence: CTT
gatccctgaagtgacgaccc

SEQ ID NO: 32292 - DNA, 20 bp, Artificial Sequence
  Description of Artificial Sequence: Synthetic oligonucleotide
  Target: COL7A1; (+) strand; PAM type: YTN; PAM sequence: TTG
atccctgaagtgacgaccca

SEQ ID NO: 32293 - DNA, 20 bp, Artificial Sequence
  Description of Artificial Sequence: Synthetic oligonucleotide
  Target: COL7A1; (+) strand; PAM type: YTN; PAM sequence: CTG
aagtgacgacccatcaggac

SEQ ID NO: 32294 - DNA, 20 bp, Artificial Sequence
  Description of Artificial Sequence: Synthetic oligonucleotide
  Target: COL7A1; (+) strand; PAM type: YTN; PAM sequence: CTC
agtcacccacatgctctctg

SEQ ID NO: 32295 - DNA, 20 bp, Artificial Sequence
  Description of Artificial Sequence: Synthetic oligonucleotide
  Target: COL7A1; (+) strand; PAM type: YTN; PAM sequence: CTC
tctgactgcccccacccccc

SEQ ID NO: 32296 - DNA, 20 bp, Artificial Sequence
  Description of Artificial Sequence: Synthetic oligonucleotide
  Target: COL7A1; (+) strand; PAM type: YTN; PAM sequence: CTC
tgactgcccccaccccccag

SEQ ID NO: 32297 - DNA, 20 bp, Artificial Sequence
  Description of Artificial Sequence: Synthetic oligonucleotide
  Target: COL7A1; (+) strand; PAM type: YTN; PAM sequence: CTG
actgcccccaccccccagct

SEQ ID NO: 32298 - DNA, 20 bp, Artificial Sequence
  Description of Artificial Sequence: Synthetic oligonucleotide
  Target: COL7A1; (+) strand; PAM type: YTN; PAM sequence: CTG
cccccaccccccagctgacc

SEQ ID NO: 32299 - DNA, 20 bp, Artificial Sequence
  Description of Artificial Sequence: Synthetic oligonucleotide
  Target: COL7A1; (+) strand; PAM type: YTN; PAM sequence: CTG
acctgtcactcctgctcggt

SEQ ID NO: 32300 - DNA, 20 bp, Artificial Sequence
  Description of Artificial Sequence: Synthetic oligonucleotide
  Target: COL7A1; (+) strand; PAM type: YTN; PAM sequence: CTG
tcactcctgctcggtcctta

SEQ ID NO: 32301 - DNA, 20 bp, Artificial Sequence
  Description of Artificial Sequence: Synthetic oligonucleotide
  Target: COL7A1; (+) strand; PAM type: YTN; PAM sequence: CTC
ctgctcggtccttacccaca

SEQ ID NO: 32302 - DNA, 20 bp, Artificial Sequence
  Description of Artificial Sequence: Synthetic oligonucleotide
  Target: COL7A1; (+) strand; PAM type: YTN; PAM sequence: CTG
ctcggtccttacccacagca

SEQ ID NO: 32303 - DNA, 20 bp, Artificial Sequence
  Description of Artificial Sequence: Synthetic oligonucleotide
  Target: COL7A1; (+) strand; PAM type: YTN; PAM sequence: CTC
ggtccttacccacagcaaat

SEQ ID NO: 32304 - DNA, 20 bp, Artificial Sequence
  Description of Artificial Sequence: Synthetic oligonucleotide
  Target: COL7A1; (+) strand; PAM type: YTN; PAM sequence: CTT
acccacagcaaatagcttga

SEQ ID NO: 32305 - DNA, 20 bp, Artificial Sequence
  Description of Artificial Sequence: Synthetic oligonucleotide
  Target: COL7A1; (+) strand; PAM type: YTN; PAM sequence: TTA
cccacagcaaatagcttgac

SEQ ID NO: 32306 - DNA, 20 bp, Artificial Sequence
  Description of Artificial Sequence: Synthetic oligonucleotide
  Target: COL7A1; (+) strand; PAM type: YTN; PAM sequence: CTT
gaccccctgccccttcagcc

SEQ ID NO: 32307 - DNA, 20 bp, Artificial Sequence
  Description of Artificial Sequence: Synthetic oligonucleotide
  Target: COL7A1; (+) strand; PAM type: YTN; PAM sequence: TTG
accccctgccccttcagcct

SEQ ID NO: 32308 - DNA, 20 bp, Artificial Sequence
  Description of Artificial Sequence: Synthetic oligonucleotide
  Target: COL7A1; (+) strand; PAM type: YTN; PAM sequence: CTG
ccccttcagcctttgggcag

SEQ ID NO: 32309 - DNA, 20 bp, Artificial Sequence
  Description of Artificial Sequence: Synthetic oligonucleotide
  Target: COL7A1; (+) strand; PAM type: YTN; PAM sequence: CTT
cagcctttgggcagctgtgt

SEQ ID NO: 32310 - DNA, 20 bp, Artificial Sequence
  Description of Artificial Sequence: Synthetic oligonucleotide
  Target: COL7A1; (+) strand; PAM type: YTN; PAM sequence: TTC
agcctttgggcagctgtgtc

SEQ ID NO: 32311 - DNA, 20 bp, Artificial Sequence
  Description of Artificial Sequence: Synthetic oligonucleotide
  Target: COL7A1; (+) strand; PAM type: YTN; PAM sequence: CTT
tgggcagctgtgtccaccag

SEQ ID NO: 32312 - DNA, 20 bp, Artificial Sequence
  Description of Artificial Sequence: Synthetic oligonucleotide
  Target: COL7A1; (+) strand; PAM type: YTN; PAM sequence: TTT
gggcagctgtgtccaccagg

SEQ ID NO: 32313 - DNA, 20 bp, Artificial Sequence
  Description of Artificial Sequence: Synthetic oligonucleotide
  Target: COL7A1; (+) strand; PAM type: YTN; PAM sequence: TTG
ggcagctgtgtccaccaggt

SEQ ID NO: 32314 - DNA, 20 bp, Artificial Sequence
  Description of Artificial Sequence: Synthetic oligonucleotide
  Target: COL7A1; (+) strand; PAM type: YTN; PAM sequence: CTG
tgtccaccaggtcctgggac

SEQ ID NO: 32315 - DNA, 20 bp, Artificial Sequence
  Description of Artificial Sequence: Synthetic oligonucleotide
  Target: COL7A1; (+) strand; PAM type: YTN; PAM sequence: CTG
ggacttcccgtctgtgatca

SEQ ID NO: 32316 - DNA, 20 bp, Artificial Sequence
  Description of Artificial Sequence: Synthetic oligonucleotide
  Target: COL7A1; (+) strand; PAM type: YTN; PAM sequence: CTT
cccgtctgtgatcaggatgc

SEQ ID NO: 32317 - DNA, 20 bp, Artificial Sequence
  Description of Artificial Sequence: Synthetic oligonucleotide
  Target: COL7A1; (+) strand; PAM type: YTN; PAM sequence: TTC
ccgtctgtgatcaggatgca

SEQ ID NO: 32318 - DNA, 20 bp, Artificial Sequence
  Description of Artificial Sequence: Synthetic oligonucleotide
  Target: COL7A1; (+) strand; PAM type: YTN; PAM sequence: CTG
tgatcaggatgcagacctgg

SEQ ID NO: 32319 - DNA, 20 bp, Artificial Sequence
  Description of Artificial Sequence: Synthetic oligonucleotide
  Target: COL7A1; (+) strand; PAM type: YTN; PAM sequence: CTG
ggacaggtgcaggggtcaaa

SEQ ID NO: 32320 - DNA, 20 bp, Artificial Sequence
  Description of Artificial Sequence: Synthetic oligonucleotide
  Target: COL7A1; (+) strand; PAM type: YTN; PAM sequence: TTC
ccctggacacttcatttggg

SEQ ID NO: 32321 - DNA, 20 bp, Artificial Sequence
  Description of Artificial Sequence: Synthetic oligonucleotide
  Target: COL7A1; (+) strand; PAM type: YTN; PAM sequence: CTG
gacacttcatttggggtcat

SEQ ID NO: 32322 - DNA, 20 bp, Artificial Sequence
  Description of Artificial Sequence: Synthetic oligonucleotide
  Target: COL7A1; (+) strand; PAM type: YTN; PAM sequence: CTT
catttggggtcatcttggga

SEQ ID NO: 32323 - DNA, 20 bp, Artificial Sequence
  Description of Artificial Sequence: Synthetic oligonucleotide
  Target: COL7A1; (+) strand; PAM type: YTN; PAM sequence: TTC
atttggggtcatcttgggag

SEQ ID NO: 32324 - DNA, 20 bp, Artificial Sequence
  Description of Artificial Sequence: Synthetic oligonucleotide
  Target: COL7A1; (+) strand; PAM type: YTN; PAM sequence: TTT
ggggtcatcttgggaggcat

SEQ ID NO: 32325 - DNA, 20 bp, Artificial Sequence
  Description of Artificial Sequence: Synthetic oligonucleotide
  Target: COL7A1; (+) strand; PAM type: YTN; PAM sequence: TTG
gggtcatcttgggaggcatg

SEQ ID NO: 32326 - DNA, 20 bp, Artificial Sequence
  Description of Artificial Sequence: Synthetic oligonucleotide
  Target: COL7A1; (+) strand; PAM type: YTN; PAM sequence: CTT
gggaggcatggtaggggtag

SEQ ID NO: 32327 - DNA, 20 bp, Artificial Sequence
  Description of Artificial Sequence: Synthetic oligonucleotide
  Target: COL7A1; (+) strand; PAM type: YTN; PAM sequence: TTG
ggaggcatggtaggggtagg

SEQ ID NO: 32328 - DNA, 20 bp, Artificial Sequence
  Description of Artificial Sequence: Synthetic oligonucleotide
  Target: COL7A1; (+) strand; PAM type: YTN; PAM sequence: CTT
ggggacaccaggtcgggcca

SEQ ID NO: 32329 - DNA, 20 bp, Artificial Sequence
  Description of Artificial Sequence: Synthetic oligonucleotide
  Target: COL7A1; (+) strand; PAM type: YTN; PAM sequence: TTG
gggacaccaggtcgggccag

SEQ ID NO: 32330 - DNA, 20 bp, Artificial Sequence
  Description of Artificial Sequence: Synthetic oligonucleotide
  Target: COL7A1; (+) strand; PAM type: YTN; PAM sequence: CTG
gggcaggaagacatggtcag

SEQ ID NO: 32331 - DNA, 20 bp, Artificial Sequence
  Description of Artificial Sequence: Synthetic oligonucleotide
  Target: COL7A1; (+) strand; PAM type: YTN; PAM sequence: TTG
cagcccctgtgcgagtgttg

SEQ ID NO: 32332 - DNA, 20 bp, Artificial Sequence
  Description of Artificial Sequence: Synthetic oligonucleotide
  Target: COL7A1; (+) strand; PAM type: YTN; PAM sequence: CTG
tgcgagtgttgccccccttg

SEQ ID NO: 32333 - DNA, 20 bp, Artificial Sequence
  Description of Artificial Sequence: Synthetic oligonucleotide
  Target: COL7A1; (+) strand; PAM type: YTN; PAM sequence: TTG
ccccccttgtagctaagctc

SEQ ID NO: 32334 - DNA, 20 bp, Artificial Sequence
  Description of Artificial Sequence: Synthetic oligonucleotide
  Target: COL7A1; (+) strand; PAM type: YTN; PAM sequence: CTT
gtagctaagctcacggatgg

SEQ ID NO: 32335 - DNA, 20 bp, Artificial Sequence
  Description of Artificial Sequence: Synthetic oligonucleotide
  Target: COL7A1; (+) strand; PAM type: YTN; PAM sequence: TTG
tagctaagctcacggatggc

SEQ ID NO: 32336 - DNA, 20 bp, Artificial Sequence
  Description of Artificial Sequence: Synthetic oligonucleotide
  Target: COL7A1; (+) strand; PAM type: YTN; PAM sequence: CTA
agctcacggatggcgcggat

SEQ ID NO: 32337 - DNA, 20 bp, Artificial Sequence
  Description of Artificial Sequence: Synthetic oligonucleotide
  Target: COL7A1; (+) strand; PAM type: YTN; PAM sequence: CTC
acggatggcgcggatcacat

SEQ ID NO: 32338 - DNA, 20 bp, Artificial Sequence
  Description of Artificial Sequence: Synthetic oligonucleotide
  Target: COL7A1; (+) strand; PAM type: YTN; PAM sequence: CTC
tgtcctgttggagggtaggg

SEQ ID NO: 32339 - DNA, 20 bp, Artificial Sequence
  Description of Artificial Sequence: Synthetic oligonucleotide
  Target: COL7A1; (+) strand; PAM type: YTN; PAM sequence: CTG
tcctgttggagggtaggggt

SEQ ID NO: 32340 - DNA, 20 bp, Artificial Sequence
  Description of Artificial Sequence: Synthetic oligonucleotide
  Target: COL7A1; (+) strand; PAM type: YTN; PAM sequence: CTG
ttggagggtaggggtggcaa

SEQ ID NO: 32341 - DNA, 20 bp, Artificial Sequence
  Description of Artificial Sequence: Synthetic oligonucleotide
  Target: COL7A1; (+) strand; PAM type: YTN; PAM sequence: TTG
gagggtaggggtggcaacag

SEQ ID NO: 32342 - DNA, 20 bp, Artificial Sequence
  Description of Artificial Sequence: Synthetic oligonucleotide
  Target: COL7A1; (+) strand; PAM type: YTN; PAM sequence: CTA
ggactcaggatctcttctgg

SEQ ID NO: 32343 - DNA, 20 bp, Artificial Sequence
  Description of Artificial Sequence: Synthetic oligonucleotide
  Target: COL7A1; (+) strand; PAM type: YTN; PAM sequence: CTC
aggatctcttctggccctgg

SEQ ID NO: 32344 - DNA, 20 bp, Artificial Sequence
  Description of Artificial Sequence: Synthetic oligonucleotide
  Target: COL7A1; (+) strand; PAM type: YTN; PAM sequence: CTC
ttctggccctggccttgagg

SEQ ID NO: 32345 - DNA, 20 bp, Artificial Sequence
  Description of Artificial Sequence: Synthetic oligonucleotide
  Target: COL7A1; (+) strand; PAM type: YTN; PAM sequence: CTT
ctggccctggccttgaggag

SEQ ID NO: 32346 - DNA, 20 bp, Artificial Sequence
  Description of Artificial Sequence: Synthetic oligonucleotide
  Target: COL7A1; (+) strand; PAM type: YTN; PAM sequence: TTC
tggccctggccttgaggagg

SEQ ID NO: 32347 - DNA, 20 bp, Artificial Sequence
  Description of Artificial Sequence: Synthetic oligonucleotide
  Target: COL7A1; (+) strand; PAM type: YTN; PAM sequence: CTG
gccctggccttgaggaggcc

SEQ ID NO: 32348 - DNA, 20 bp, Artificial Sequence
  Description of Artificial Sequence: Synthetic oligonucleotide
  Target: COL7A1; (+) strand; PAM type: YTN; PAM sequence: CTG
gccttgaggaggcctctagg

SEQ ID NO: 32349 - DNA, 20 bp, Artificial Sequence
  Description of Artificial Sequence: Synthetic oligonucleotide
  Target: COL7A1; (+) strand; PAM type: YTN; PAM sequence: CTT
gaggaggcctctagggtgag

SEQ ID NO: 32350 - DNA, 20 bp, Artificial Sequence
  Description of Artificial Sequence: Synthetic oligonucleotide
  Target: COL7A1; (+) strand; PAM type: YTN; PAM sequence: TTG
aggaggcctctagggtgagg

SEQ ID NO: 32351 - DNA, 20 bp, Artificial Sequence
  Description of Artificial Sequence: Synthetic oligonucleotide
  Target: COL7A1; (+) strand; PAM type: YTN; PAM sequence: CTC
tagggtgagggttacgggta

SEQ ID NO: 32352 - DNA, 20 bp, Artificial Sequence
  Description of Artificial Sequence: Synthetic oligonucleotide
  Target: COL7A1; (+) strand; PAM type: YTN; PAM sequence: CTA
gggtgagggttacgggtatc

SEQ ID NO: 32353 - DNA, 20 bp, Artificial Sequence
  Description of Artificial Sequence: Synthetic oligonucleotide
  Target: COL7A1; (+) strand; PAM type: YTN; PAM sequence: TTA
cgggtatcaggctctcttga

SEQ ID NO: 32354 - DNA, 20 bp, Artificial Sequence
  Description of Artificial Sequence: Synthetic oligonucleotide
  Target: COL7A1; (+) strand; PAM type: YTN; PAM sequence: CTC
tcttgaggggtcccttcgtt

SEQ ID NO: 32355 - DNA, 20 bp, Artificial Sequence
  Description of Artificial Sequence: Synthetic oligonucleotide
  Target: COL7A1; (+) strand; PAM type: YTN; PAM sequence: CTC
ttgaggggtcccttcgttct

SEQ ID NO: 32356 - DNA, 20 bp, Artificial Sequence
  Description of Artificial Sequence: Synthetic oligonucleotide
  Target: COL7A1; (+) strand; PAM type: YTN; PAM sequence: CTT
gaggggtcccttcgttctgt

SEQ ID NO: 32357 - DNA, 20 bp, Artificial Sequence
  Description of Artificial Sequence: Synthetic oligonucleotide
  Target: COL7A1; (+) strand; PAM type: YTN; PAM sequence: TTG
aggggtcccttcgttctgtc

SEQ ID NO: 32358 - DNA, 20 bp, Artificial Sequence
  Description of Artificial Sequence: Synthetic oligonucleotide
  Target: COL7A1; (+) strand; PAM type: YTN; PAM sequence: CTT
cgttctgtcattctccacac

SEQ ID NO: 32359 - DNA, 20 bp, Artificial Sequence
  Description of Artificial Sequence: Synthetic oligonucleotide
  Target: COL7A1; (+) strand; PAM type: YTN; PAM sequence: TTC
gttctgtcattctccacacc

SEQ ID NO: 32360 - DNA, 20 bp, Artificial Sequence
  Description of Artificial Sequence: Synthetic oligonucleotide
  Target: COL7A1; (+) strand; PAM type: YTN; PAM sequence: TTC
tgtcattctccacacccact

SEQ ID NO: 32361 - DNA, 20 bp, Artificial Sequence
  Description of Artificial Sequence: Synthetic oligonucleotide
  Target: COL7A1; (+) strand; PAM type: YTN; PAM sequence: CTG
tcattctccacacccacttg

SEQ ID NO: 32362 - DNA, 20 bp, Artificial Sequence
  Description of Artificial Sequence: Synthetic oligonucleotide
  Target: COL7A1; (+) strand; PAM type: YTN; PAM sequence: TTC
tccacacccacttgcctctg

SEQ ID NO: 32363 - DNA, 20 bp, Artificial Sequence
  Description of Artificial Sequence: Synthetic oligonucleotide
  Target: COL7A1; (+) strand; PAM type: YTN; PAM sequence: CTC
cacacccacttgcctctgga

SEQ ID NO: 32364 - DNA, 20 bp, Artificial Sequence
  Description of Artificial Sequence: Synthetic oligonucleotide
  Target: COL7A1; (+) strand; PAM type: YTN; PAM sequence: CTT
gcctctggaacccccaggtt

SEQ ID NO: 32365 - DNA, 20 bp, Artificial Sequence
  Description of Artificial Sequence: Synthetic oligonucleotide
  Target: COL7A1; (+) strand; PAM type: YTN; PAM sequence: TTG
cctctggaacccccaggtta

SEQ ID NO: 32366 - DNA, 20 bp, Artificial Sequence
  Description of Artificial Sequence: Synthetic oligonucleotide
  Target: COL7A1; (+) strand; PAM type: YTN; PAM sequence: CTC
tggaacccccaggttaacaa

SEQ ID NO: 32367 - DNA, 20 bp, Artificial Sequence
  Description of Artificial Sequence: Synthetic oligonucleotide
  Target: COL7A1; (+) strand; PAM type: YTN; PAM sequence: CTG
gaacccccaggttaacaaac

SEQ ID NO: 32368 - DNA, 20 bp, Artificial Sequence
  Description of Artificial Sequence: Synthetic oligonucleotide
  Target: COL7A1; (+) strand; PAM type: YTN; PAM sequence: TTA
acaaactccccaggggctcc

SEQ ID NO: 32369 - DNA, 20 bp, Artificial Sequence
  Description of Artificial Sequence: Synthetic oligonucleotide
  Target: COL7A1; (+) strand; PAM type: YTN; PAM sequence: CTC
cccaggggctcctttgtgca

SEQ ID NO: 32370 - DNA, 20 bp, Artificial Sequence
  Description of Artificial Sequence: Synthetic oligonucleotide
  Target: COL7A1; (+) strand; PAM type: YTN; PAM sequence: CTC
ctttgtgcaccatctgcagg

SEQ ID NO: 32371 - DNA, 20 bp, Artificial Sequence
  Description of Artificial Sequence: Synthetic oligonucleotide
  Target: COL7A1; (+) strand; PAM type: YTN; PAM sequence: CTT
tgtgcaccatctgcaggtgg

SEQ ID NO: 32372 - DNA, 20 bp, Artificial Sequence
  Description of Artificial Sequence: Synthetic oligonucleotide
  Target: COL7A1; (+) strand; PAM type: YTN; PAM sequence: TTT
gtgcaccatctgcaggtggg

SEQ ID NO: 32373 - DNA, 20 bp, Artificial Sequence
  Description of Artificial Sequence: Synthetic oligonucleotide
  Target: COL7A1; (+) strand; PAM type: YTN; PAM sequence: TTG
tgcaccatctgcaggtgggc

SEQ ID NO: 32374 - DNA, 20 bp, Artificial Sequence
  Description of Artificial Sequence: Synthetic oligonucleotide
  Target: COL7A1; (+) strand; PAM type: YTN; PAM sequence: CTG
caggtgggcctgggcagacc

SEQ ID NO: 32375 - DNA, 20 bp, Artificial Sequence
  Description of Artificial Sequence: Synthetic oligonucleotide
  Target: COL7A1; (+) strand; PAM type: YTN; PAM sequence: CTG
ggcagacctgaaggagccct

SEQ ID NO: 32376 - DNA, 20 bp, Artificial Sequence
  Description of Artificial Sequence: Synthetic oligonucleotide
  Target: COL7A1; (+) strand; PAM type: YTN; PAM sequence: CTG
aaggagcccttaggggctca

SEQ ID NO: 32377 - DNA, 20 bp, Artificial Sequence
  Description of Artificial Sequence: Synthetic oligonucleotide
  Target: COL7A1; (+) strand; PAM type: YTN; PAM sequence: CTT
aggggctcacagtctgtggg

SEQ ID NO: 32378 - DNA, 20 bp, Artificial Sequence
  Description of Artificial Sequence: Synthetic oligonucleotide
  Target: COL7A1; (+) strand; PAM type: YTN; PAM sequence: TTA
ggggctcacagtctgtgggg

SEQ ID NO: 32379 - DNA, 20 bp, Artificial Sequence
  Description of Artificial Sequence: Synthetic oligonucleotide
  Target: COL7A1; (+) strand; PAM type: YTN; PAM sequence: CTC
acagtctgtggggaacaaga

SEQ ID NO: 32380 - DNA, 20 bp, Artificial Sequence
  Description of Artificial Sequence: Synthetic oligonucleotide
  Target: COL7A1; (+) strand; PAM type: YTN; PAM sequence: CTG
tggggaacaagatgctgctt

SEQ ID NO: 32381 - DNA, 20 bp, Artificial Sequence
  Description of Artificial Sequence: Synthetic oligonucleotide
  Target: COL7A1; (+) strand; PAM type: YTN; PAM sequence: CTG
cttaattaaataattgcagg

SEQ ID NO: 32382 - DNA, 20 bp, Artificial Sequence
  Description of Artificial Sequence: Synthetic oligonucleotide
  Target: COL7A1; (+) strand; PAM type: YTN; PAM sequence: CTT
aattaaataattgcaggagg

SEQ ID NO: 32383 - DNA, 20 bp, Artificial Sequence
  Description of Artificial Sequence: Synthetic oligonucleotide
  Target: COL7A1; (+) strand; PAM type: YTN; PAM sequence: TTA
attaaataattgcaggagga

SEQ ID NO: 32384 - DNA, 20 bp, Artificial Sequence
  Description of Artificial Sequence: Synthetic oligonucleotide
  Target: COL7A1; (+) strand; PAM type: YTN; PAM sequence: TTA
aataattgcaggaggagggg

SEQ ID NO: 32385 - DNA, 20 bp, Artificial Sequence
  Description of Artificial Sequence: Synthetic oligonucleotide
  Target: COL7A1; (+) strand; PAM type: YTN; PAM sequence: TTG
caggaggaggggtccagatg

SEQ ID NO: 32386 - DNA, 20 bp, Artificial Sequence
  Description of Artificial Sequence: Synthetic oligonucleotide
  Target: COL7A1; (+) strand; PAM type: YTN; PAM sequence: CTG
gccagatggagcacctctgg

SEQ ID NO: 32387 - DNA, 20 bp, Artificial Sequence
  Description of Artificial Sequence: Synthetic oligonucleotide
  Target: COL7A1; (+) strand; PAM type: YTN; PAM sequence: CTC
tggtgaacggctgcaagggt

SEQ ID NO: 32388 - DNA, 20 bp, Artificial Sequence
  Description of Artificial Sequence: Synthetic oligonucleotide
  Target: COL7A1; (+) strand; PAM type: YTN; PAM sequence: CTG
gtgaacggctgcaagggtta

SEQ ID NO: 32389 - DNA, 20 bp, Artificial Sequence
  Description of Artificial Sequence: Synthetic oligonucleotide
  Target: COL7A1; (+) strand; PAM type: YTN; PAM sequence: CTG
caagggttagagggctagaa

SEQ ID NO: 32390 - DNA, 20 bp, Artificial Sequence
  Description of Artificial Sequence: Synthetic oligonucleotide
  Target: COL7A1; (+) strand; PAM type: YTN; PAM sequence: TTA
gagggctagaacgtggagaa

SEQ ID NO: 32391 - DNA, 20 bp, Artificial Sequence
  Description of Artificial Sequence: Synthetic oligonucleotide
  Target: COL7A1; (+) strand; PAM type: YTN; PAM sequence: CTA
gaacgtggagaatccaacag

SEQ ID NO: 32392 - DNA, 20 bp, Artificial Sequence
  Description of Artificial Sequence: Synthetic oligonucleotide
  Target: COL7A1; (+) strand; PAM type: YTN; PAM sequence: CTC
ctgggctccccatctccaga

SEQ ID NO: 32393 - DNA, 20 bp, Artificial Sequence
  Description of Artificial Sequence: Synthetic oligonucleotide
  Target: COL7A1; (+) strand; PAM type: YTN; PAM sequence: CTG
ggctccccatctccagatca

SEQ ID NO: 32394 - DNA, 20 bp, Artificial Sequence
  Description of Artificial Sequence: Synthetic oligonucleotide
  Target: COL7A1; (+) strand; PAM type: YTN; PAM sequence: CTC
cccatctccagatcagaaaa

SEQ ID NO: 32395 - DNA, 20 bp, Artificial Sequence
  Description of Artificial Sequence: Synthetic oligonucleotide
  Target: COL7A1; (+) strand; PAM type: YTN; PAM sequence: CTC
cagatcagaaaacacagcct

SEQ ID NO: 32396 - DNA, 20 bp, Artificial Sequence
  Description of Artificial Sequence: Synthetic oligonucleotide
  Target: COL7A1; (+) strand; PAM type: YTN; PAM sequence: CTC
actgtcttgcaccttcctgt

SEQ ID NO: 32397 - DNA, 20 bp, Artificial Sequence
  Description of Artificial Sequence: Synthetic oligonucleotide
  Target: COL7A1; (+) strand; PAM type: YTN; PAM sequence: CTG
tcttgcaccttcctgtcttg

SEQ ID NO: 32398 - DNA, 20 bp, Artificial Sequence
  Description of Artificial Sequence: Synthetic oligonucleotide
  Target: COL7A1; (+) strand; PAM type: YTN; PAM sequence: CTT
gcaccttcctgtcttgcagt

SEQ ID NO: 32399 - DNA, 20 bp, Artificial Sequence
  Description of Artificial Sequence: Synthetic oligonucleotide
  Target: COL7A1; (+) strand; PAM type: YTN; PAM sequence: TTG
caccttcctgtcttgcagta

SEQ ID NO: 32400 - DNA, 20 bp, Artificial Sequence
  Description of Artificial Sequence: Synthetic oligonucleotide
  Target: COL7A1; (+) strand; PAM type: YTN; PAM sequence: CTT
cctgtcttgcagtagcctgg

SEQ ID NO: 32401 - DNA, 20 bp, Artificial Sequence
  Description of Artificial Sequence: Synthetic oligonucleotide
  Target: COL7A1; (+) strand; PAM type: YTN; PAM sequence: TTC
ctgtcttgcagtagcctgga

SEQ ID NO: 32402 - DNA, 20 bp, Artificial Sequence
  Description of Artificial Sequence: Synthetic oligonucleotide
  Target: COL7A1; (+) strand; PAM type: YTN; PAM sequence: CTG
tcttgcagtagcctggaggt

SEQ ID NO: 32403 - DNA, 20 bp, Artificial Sequence
  Description of Artificial Sequence: Synthetic oligonucleotide
  Target: COL7A1; (+) strand; PAM type: YTN; PAM sequence: CTT
gcagtagcctggaggtgcct

SEQ ID NO: 32404 - DNA, 20 bp, Artificial Sequence
  Description of Artificial Sequence: Synthetic oligonucleotide
  Target: COL7A1; (+) strand; PAM type: YTN; PAM sequence: TTG
cagtagcctggaggtgcctc

SEQ ID NO: 32405 - DNA, 20 bp, Artificial Sequence
  Description of Artificial Sequence: Synthetic oligonucleotide
  Target: COL7A1; (+) strand; PAM type: YTN; PAM sequence: CTG
gaggtgcctcagggcacgaa

SEQ ID NO: 32406 - DNA, 20 bp, Artificial Sequence
  Description of Artificial Sequence: Synthetic oligonucleotide
  Target: COL7A1; (+) strand; PAM type: YTN; PAM sequence: CTC
agggcacgaaggttctacct

SEQ ID NO: 32407 - DNA, 20 bp, Artificial Sequence
  Description of Artificial Sequence: Synthetic oligonucleotide
  Target: COL7A1; (+) strand; PAM type: YTN; PAM sequence: TTC
tacctagggaatccttacct

SEQ ID NO: 32408 - DNA, 20 bp, Artificial Sequence
  Description of Artificial Sequence: Synthetic oligonucleotide
  Target: COL7A1; (+) strand; PAM type: YTN; PAM sequence: CTA
cctagggaatccttacctct

SEQ ID NO: 32409 - DNA, 20 bp, Artificial Sequence
  Description of Artificial Sequence: Synthetic oligonucleotide
  Target: COL7A1; (+) strand; PAM type: YTN; PAM sequence: CTA
gggaatccttacctctgtct

SEQ ID NO: 32410 - DNA, 20 bp, Artificial Sequence
  Description of Artificial Sequence: Synthetic oligonucleotide
  Target: COL7A1; (+) strand; PAM type: YTN; PAM sequence: CTT
acctctgtctccaaaggagg

SEQ ID NO: 32411 - DNA, 20 bp, Artificial Sequence
  Description of Artificial Sequence: Synthetic oligonucleotide
  Target: COL7A1; (+) strand; PAM type: YTN; PAM sequence: TTA
cctctgtctccaaaggaggt

SEQ ID NO: 32412 - DNA, 20 bp, Artificial Sequence
  Description of Artificial Sequence: Synthetic oligonucleotide
  Target: COL7A1; (+) strand; PAM type: YTN; PAM sequence: CTC
tgtctccaaaggaggtcctg

SEQ ID NO: 32413 - DNA, 20 bp, Artificial Sequence
  Description of Artificial Sequence: Synthetic oligonucleotide
  Target: COL7A1; (+) strand; PAM type: YTN; PAM sequence: CTG
tctccaaaggaggtcctggc

SEQ ID NO: 32414 - DNA, 20 bp, Artificial Sequence
  Description of Artificial Sequence: Synthetic oligonucleotide
  Target: COL7A1; (+) strand; PAM type: YTN; PAM sequence: CTC
caaaggaggtcctggctagg

SEQ ID NO: 32415 - DNA, 20 bp, Artificial Sequence
  Description of Artificial Sequence: Synthetic oligonucleotide
  Target: COL7A1; (+) strand; PAM type: YTN; PAM sequence: CTG
gctagggggtctctaggttc

SEQ ID NO: 32416 - DNA, 20 bp, Artificial Sequence
  Description of Artificial Sequence: Synthetic oligonucleotide
  Target: COL7A1; (+) strand; PAM type: YTN; PAM sequence: CTA
gggggtctctaggttcccca

SEQ ID NO: 32417 - DNA, 20 bp, Artificial Sequence
  Description of Artificial Sequence: Synthetic oligonucleotide
  Target: COL7A1; (+) strand; PAM type: YTN; PAM sequence: CTC
taggttccccaaaacttgtt

SEQ ID NO: 32418 - DNA, 20 bp, Artificial Sequence
  Description of Artificial Sequence: Synthetic oligonucleotide
  Target: COL7A1; (+) strand; PAM type: YTN; PAM sequence: CTA
ggttccccaaaacttgtttc

SEQ ID NO: 32419 - DNA, 20 bp, Artificial Sequence
  Description of Artificial Sequence: Synthetic oligonucleotide
  Target: COL7A1; (+) strand; PAM type: YTN; PAM sequence: TTC
cccaaaacttgtttctgcaa

SEQ ID NO: 32420 - DNA, 20 bp, Artificial Sequence
  Description of Artificial Sequence: Synthetic oligonucleotide
  Target: COL7A1; (+) strand; PAM type: YTN; PAM sequence: CTT
gtttctgcaaagacctggcc

SEQ ID NO: 32421 - DNA, 20 bp, Artificial Sequence
  Description of Artificial Sequence: Synthetic oligonucleotide
  Target: COL7A1; (+) strand; PAM type: YTN; PAM sequence: TTG
tttctgcaaagacctggcct

SEQ ID NO: 32422 - DNA, 20 bp, Artificial Sequence
  Description of Artificial Sequence: Synthetic oligonucleotide
  Target: COL7A1; (+) strand; PAM type: YTN; PAM sequence: TTT
ctgcaaagacctggcctggg

SEQ ID NO: 32423 - DNA, 20 bp, Artificial Sequence
  Description of Artificial Sequence: Synthetic oligonucleotide
  Target: COL7A1; (+) strand; PAM type: YTN; PAM sequence: TTC
tgcaaagacctggcctgggg

SEQ ID NO: 32424 - DNA, 20 bp, Artificial Sequence
  Description of Artificial Sequence: Synthetic oligonucleotide
  Target: COL7A1; (+) strand; PAM type: YTN; PAM sequence: CTG
caaagacctggcctggggtt

SEQ ID NO: 32425 - DNA, 20 bp, Artificial Sequence
  Description of Artificial Sequence: Synthetic oligonucleotide
  Target: COL7A1; (+) strand; PAM type: YTN; PAM sequence: CTG
gcctggggtttccagggtct

SEQ ID NO: 32426 - DNA, 20 bp, Artificial Sequence
  Description of Artificial Sequence: Synthetic oligonucleotide
  Target: COL7A1; (+) strand; PAM type: YTN; PAM sequence: CTG
gggtttccagggtctcctcc

SEQ ID NO: 32427 - DNA, 20 bp, Artificial Sequence
  Description of Artificial Sequence: Synthetic oligonucleotide
  Target: COL7A1; (+) strand; PAM type: YTN; PAM sequence: TTT
ccagggtctcctccctctct

SEQ ID NO: 32428 - DNA, 20 bp, Artificial Sequence
  Description of Artificial Sequence: Synthetic oligonucleotide
  Target: COL7A1; (+) strand; PAM type: YTN; PAM sequence: TTC
cagggtctcctccctctctg

SEQ ID NO: 32429 - DNA, 20 bp, Artificial Sequence
  Description of Artificial Sequence: Synthetic oligonucleotide
  Target: COL7A1; (+) strand; PAM type: YTN; PAM sequence: CTC
ctccctctctggggaaggag

SEQ ID NO: 32430 - DNA, 20 bp, Artificial Sequence
  Description of Artificial Sequence: Synthetic oligonucleotide
  Target: COL7A1; (+) strand; PAM type: YTN; PAM sequence: CTC
cctctctggggaaggagtct

SEQ ID NO: 32431 - DNA, 20 bp, Artificial Sequence
  Description of Artificial Sequence: Synthetic oligonucleotide
  Target: COL7A1; (+) strand; PAM type: YTN; PAM sequence: CTC
tctggggaaggagtcttggt

SEQ ID NO: 32432 - DNA, 20 bp, Artificial Sequence
  Description of Artificial Sequence: Synthetic oligonucleotide
  Target: COL7A1; (+) strand; PAM type: YTN; PAM sequence: CTC
tggggaaggagtcttggtgg

SEQ ID NO: 32433 - DNA, 20 bp, Artificial Sequence
  Description of Artificial Sequence: Synthetic oligonucleotide
  Target: COL7A1; (+) strand; PAM type: YTN; PAM sequence: CTG
gggaaggagtcttggtgggg

SEQ ID NO: 32434 - DNA, 20 bp, Artificial Sequence
  Description of Artificial Sequence: Synthetic oligonucleotide
  Target: COL7A1; (+) strand; PAM type: YTN; PAM sequence: CTT
ggtggggatctcgtggtccc

SEQ ID NO: 32435 - DNA, 20 bp, Artificial Sequence
  Description of Artificial Sequence: Synthetic oligonucleotide
  Target: COL7A1; (+) strand; PAM type: YTN; PAM sequence: TTG
gtggggatctcgtggtcccc

SEQ ID NO: 32436 - DNA, 20 bp, Artificial Sequence
  Description of Artificial Sequence: Synthetic oligonucleotide
  Target: COL7A1; (+) strand; PAM type: YTN; PAM sequence: CTC
gtggtccccagcccccaggg

SEQ ID NO: 32437 - DNA, 20 bp, Artificial Sequence
  Description of Artificial Sequence: Synthetic oligonucleotide
  Target: COL7A1; (+) strand; PAM type: YTN; PAM sequence: CTA
ctcaccgtgggtcatcgctg

SEQ ID NO: 32438 - DNA, 20 bp, Artificial Sequence
  Description of Artificial Sequence: Synthetic oligonucleotide
  Target: COL7A1; (+) strand; PAM type: YTN; PAM sequence: CTC
accgtgggtcatcgctgtac

SEQ ID NO: 32439 - DNA, 20 bp, Artificial Sequence
  Description of Artificial Sequence: Synthetic oligonucleotide
  Target: COL7A1; (+) strand; PAM type: YTN; PAM sequence: CTG
tactgcactgtggcaaagcg

SEQ ID NO: 32440 - DNA, 20 bp, Artificial Sequence
  Description of Artificial Sequence: Synthetic oligonucleotide
  Target: COL7A1; (+) strand; PAM type: YTN; PAM sequence: CTG
cactgtggcaaagcgcacac

SEQ ID NO: 32441 - DNA, 20 bp, Artificial Sequence
  Description of Artificial Sequence: Synthetic oligonucleotide
  Target: COL7A1; (+) strand; PAM type: YTN; PAM sequence: CTG
tggcaaagcgcacaccctgt

SEQ ID NO: 32442 - DNA, 20 bp, Artificial Sequence
  Description of Artificial Sequence: Synthetic oligonucleotide
  Target: COL7A1; (+) strand; PAM type: YTN; PAM sequence: CTG
tgcactggctgctccagaga

SEQ ID NO: 32443 - DNA, 20 bp, Artificial Sequence
  Description of Artificial Sequence: Synthetic oligonucleotide
  Target: COL7A1; (+) strand; PAM type: YTN; PAM sequence: CTG
gctgctccagagaaaggcag

SEQ ID NO: 32444 - DNA, 20 bp, Artificial Sequence
  Description of Artificial Sequence: Synthetic oligonucleotide
  Target: COL7A1; (+) strand; PAM type: YTN; PAM sequence: CTG
ctccagagaaaggcagcacc

SEQ ID NO: 32445 - DNA, 20 bp, Artificial Sequence
  Description of Artificial Sequence: Synthetic oligonucleotide
  Target: COL7A1; (+) strand; PAM type: YTN; PAM sequence: CTC
cagagaaaggcagcaccagc

SEQ ID NO: 32446 - DNA, 20 bp, Artificial Sequence
  Description of Artificial Sequence: Synthetic oligonucleotide
  Target: COL7A1; (+) strand; PAM type: YTN; PAM sequence: CTT
cgagaaagctgcggacctcg

SEQ ID NO: 32447 - DNA, 20 bp, Artificial Sequence
  Description of Artificial Sequence: Synthetic oligonucleotide
  Target: COL7A1; (+) strand; PAM type: YTN; PAM sequence: TTC
gagaaagctgcggacctcgc

SEQ ID NO: 32448 - DNA, 20 bp, Artificial Sequence
  Description of Artificial Sequence: Synthetic oligonucleotide
  Target: COL7A1; (+) strand; PAM type: YTN; PAM sequence: CTG
cggacctcgcggaaattgct

SEQ ID NO: 32449 - DNA, 20 bp, Artificial Sequence
  Description of Artificial Sequence: Synthetic oligonucleotide
  Target: COL7A1; (+) strand; PAM type: YTN; PAM sequence: CTC
gcggaaattgctgcggccaa

SEQ ID NO: 32450 - DNA, 20 bp, Artificial Sequence
  Description of Artificial Sequence: Synthetic oligonucleotide
  Target: COL7A1; (+) strand; PAM type: YTN; PAM sequence: TTG
ctgcggccaatggatgagga

SEQ ID NO: 32451 - DNA, 20 bp, Artificial Sequence
  Description of Artificial Sequence: Synthetic oligonucleotide
  Target: COL7A1; (+) strand; PAM type: YTN; PAM sequence: CTG
cggccaatggatgaggagcc

SEQ ID NO: 32452 - DNA, 20 bp, Artificial Sequence
  Description of Artificial Sequence: Synthetic oligonucleotide
  Target: COL7A1; (+) strand; PAM type: YTN; PAM sequence: CTG
gggcgggcaggagagatcag

SEQ ID NO: 32453 - DNA, 20 bp, Artificial Sequence
  Description of Artificial Sequence: Synthetic oligonucleotide
  Target: COL7A1; (+) strand; PAM type: YTN; PAM sequence: CTC
ttctgggaggccaaccaccc

SEQ ID NO: 32454 - DNA, 20 bp, Artificial Sequence
  Description of Artificial Sequence: Synthetic oligonucleotide
  Target: COL7A1; (+) strand; PAM type: YTN; PAM sequence: CTT
ctgggaggccaaccacccgc

SEQ ID NO: 32455 - DNA, 20 bp, Artificial Sequence
  Description of Artificial Sequence: Synthetic oligonucleotide
  Target: COL7A1; (+) strand; PAM type: YTN; PAM sequence: TTC
tgggaggccaaccacccgcc

SEQ ID NO: 32456 - DNA, 20 bp, Artificial Sequence
  Description of Artificial Sequence: Synthetic oligonucleotide
  Target: COL7A1; (+) strand; PAM type: YTN; PAM sequence: CTG
ggaggccaaccacccgccta

SEQ ID NO: 32457 - DNA, 20 bp, Artificial Sequence
  Description of Artificial Sequence: Synthetic oligonucleotide
  Target: COL7A1; (+) strand; PAM type: YTN; PAM sequence: CTA
cccgcacggtggcctcactg

SEQ ID NO: 32458 - DNA, 20 bp, Artificial Sequence
  Description of Artificial Sequence: Synthetic oligonucleotide
  Target: COL7A1; (+) strand; PAM type: YTN; PAM sequence: CTC
actgggacttgggatggtgg

SEQ ID NO: 32459 - DNA, 20 bp, Artificial Sequence
  Description of Artificial Sequence: Synthetic oligonucleotide
  Target: COL7A1; (+) strand; PAM type: YTN; PAM sequence: CTG
ggacttgggatggtggggag

SEQ ID NO: 32460 - DNA, 20 bp, Artificial Sequence
  Description of Artificial Sequence: Synthetic oligonucleotide
  Target: COL7A1; (+) strand; PAM type: YTN; PAM sequence: CTT
gggatggtggggagagtagg

SEQ ID NO: 32461 - DNA, 20 bp, Artificial Sequence
  Description of Artificial Sequence: Synthetic oligonucleotide
  Target: COL7A1; (+) strand; PAM type: YTN; PAM sequence: TTG
ggatggtggggagagtaggc

SEQ ID NO: 32462 - DNA, 20 bp, Artificial Sequence
  Description of Artificial Sequence: Synthetic oligonucleotide
  Target: COL7A1; (+) strand; PAM type: YTN; PAM sequence: CTC
atcttatgcaaaccagggcc

SEQ ID NO: 32463 - DNA, 20 bp, Artificial Sequence
  Description of Artificial Sequence: Synthetic oligonucleotide
  Target: COL7A1; (+) strand; PAM type: YTN; PAM sequence: CTT
atgcaaaccagggccgaatc

SEQ ID NO: 32464 - DNA, 20 bp, Artificial Sequence
  Description of Artificial Sequence: Synthetic oligonucleotide
  Target: COL7A1; (+) strand; PAM type: YTN; PAM sequence: TTA
tgcaaaccagggccgaatcg

SEQ ID NO: 32465 - DNA, 20 bp, Artificial Sequence
  Description of Artificial Sequence: Synthetic oligonucleotide
  Target: COL7A1; (+) strand; PAM type: YTN; PAM sequence: CTG
agcctgagggccttggaggg

SEQ ID NO: 32466 - DNA, 20 bp, Artificial Sequence
  Description of Artificial Sequence: Synthetic oligonucleotide
  Target: COL7A1; (+) strand; PAM type: YTN; PAM sequence: CTG
agggccttggagggagttga

SEQ ID NO: 32467 - DNA, 20 bp, Artificial Sequence
  Description of Artificial Sequence: Synthetic oligonucleotide
  Target: COL7A1; (+) strand; PAM type: YTN; PAM sequence: CTT
ggagggagttgagctcggtg

SEQ ID NO: 32468 - DNA, 20 bp, Artificial Sequence
  Description of Artificial Sequence: Synthetic oligonucleotide
  Target: COL7A1; (+) strand; PAM type: YTN; PAM sequence: TTG
gagggagttgagctcggtgg

SEQ ID NO: 32469 - DNA, 20 bp, Artificial Sequence
  Description of Artificial Sequence: Synthetic oligonucleotide
  Target: COL7A1; (+) strand; PAM type: YTN; PAM sequence: TTG
agctcggtgggtcccagagc

SEQ ID NO: 32470 - DNA, 20 bp, Artificial Sequence
  Description of Artificial Sequence: Synthetic oligonucleotide
  Target: COL7A1; (+) strand; PAM type: YTN; PAM sequence: CTC
ggtgggtcccagagcagact

SEQ ID NO: 32471 - DNA, 20 bp, Artificial Sequence
  Description of Artificial Sequence: Synthetic oligonucleotide
  Target: COL7A1; (+) strand; PAM type: YTN; PAM sequence: CTC
ccgcggagggttgggggtgt

SEQ ID NO: 32472 - DNA, 20 bp, Artificial Sequence
  Description of Artificial Sequence: Synthetic oligonucleotide
  Target: COL7A1; (+) strand; PAM type: YTN; PAM sequence: TTG
ggggtgtgcgggggagggag

SEQ ID NO: 32473 - DNA, 20 bp, Artificial Sequence
  Description of Artificial Sequence: Synthetic oligonucleotide
  Target: COL7A1; (+) strand; PAM type: YTN; PAM sequence: CTT
gggactgaggtcagcctcta

SEQ ID NO: 32474 - DNA, 20 bp, Artificial Sequence
  Description of Artificial Sequence: Synthetic oligonucleotide
  Target: COL7A1; (+) strand; PAM type: YTN; PAM sequence: TTG
ggactgaggtcagcctctag

SEQ ID NO: 32475 - DNA, 20 bp, Artificial Sequence
  Description of Artificial Sequence: Synthetic oligonucleotide
  Target: COL7A1; (+) strand; PAM type: YTN; PAM sequence: CTG
aggtcagcctctaggggccg

SEQ ID NO: 32476 - DNA, 20 bp, Artificial Sequence
  Description of Artificial Sequence: Synthetic oligonucleotide
  Target: COL7A1; (+) strand; PAM type: YTN; PAM sequence: CTC
taggggccggcgtggattgg

SEQ ID NO: 32477 - DNA, 20 bp, Artificial Sequence
  Description of Artificial Sequence: Synthetic oligonucleotide
  Target: COL7A1; (+) strand; PAM type: YTN; PAM sequence: CTA
ggggccggcgtggattggca

SEQ ID NO: 32478 - DNA, 20 bp, Artificial Sequence
  Description of Artificial Sequence: Synthetic oligonucleotide
  Target: COL7A1; (+) strand; PAM type: YTN; PAM sequence: TTG
gcataaggcaggggaccccg

SEQ ID NO: 32479 - DNA, 20 bp, Artificial Sequence
  Description of Artificial Sequence: Synthetic oligonucleotide
  Target: COL7A1; (+) strand; PAM type: YTN; PAM sequence: TTT
gggtaggaacaggataggag

SEQ ID NO: 32480 - DNA, 20 bp, Artificial Sequence
  Description of Artificial Sequence: Synthetic oligonucleotide
  Target: COL7A1; (+) strand; PAM type: YTN; PAM sequence: TTG
ggtaggaacaggataggagg

SEQ ID NO: 32481 - DNA, 20 bp, Artificial Sequence
  Description of Artificial Sequence: Synthetic oligonucleotide
  Target: COL7A1; (+) strand; PAM type: YTN; PAM sequence: TTT
agggaacccagcaccgatcg

SEQ ID NO: 32482 - DNA, 20 bp, Artificial Sequence
  Description of Artificial Sequence: Synthetic oligonucleotide
  Target: COL7A1; (+) strand; PAM type: YTN; PAM sequence: TTA
gggaacccagcaccgatcgc

SEQ ID NO: 32483 - DNA, 20 bp, Artificial Sequence
  Description of Artificial Sequence: Synthetic oligonucleotide
  Target: COL7A1; (+) strand; PAM type: YTN; PAM sequence: TTC
ggggagtcccagaattagga

SEQ ID NO: 32484 - DNA, 20 bp, Artificial Sequence
  Description of Artificial Sequence: Synthetic oligonucleotide
  Target: COL7A1; (+) strand; PAM type: YTN; PAM sequence: TTA
ggaggaatccgcggggcgtc

SEQ ID NO: 32485 - DNA, 20 bp, Artificial Sequence
  Description of Artificial Sequence: Synthetic oligonucleotide
  Target: COL7A1; (+) strand; PAM type: YTN; PAM sequence: TTG
gctgggttgtgggcgggggg

SEQ ID NO: 32486 - DNA, 20 bp, Artificial Sequence
  Description of Artificial Sequence: Synthetic oligonucleotide
  Target: COL7A1; (+) strand; PAM type: YTN; PAM sequence: CTG
ggttgtgggcggggggtgtt

SEQ ID NO: 32487 - DNA, 20 bp, Artificial Sequence
  Description of Artificial Sequence: Synthetic oligonucleotide
  Target: COL7A1; (+) strand; PAM type: YTN; PAM sequence: TTG
tgggcggggggtgttgggga

SEQ ID NO: 32488 - DNA, 20 bp, Artificial Sequence
  Description of Artificial Sequence: Synthetic oligonucleotide
  Target: COL7A1; (+) strand; PAM type: YTN; PAM sequence: TTG
gggatgaaggccgagtggag

SEQ ID NO: 32489 - DNA, 20 bp, Artificial Sequence
  Description of Artificial Sequence: Synthetic oligonucleotide
  Target: COL7A1; (+) strand; PAM type: YTN; PAM sequence: CTC
ccttgcggtgcccacctctc

SEQ ID NO: 32490 - DNA, 20 bp, Artificial Sequence
  Description of Artificial Sequence: Synthetic oligonucleotide
  Target: COL7A1; (+) strand; PAM type: YTN; PAM sequence: CTT
gcggtgcccacctctctccc

SEQ ID NO: 32491 - DNA, 20 bp, Artificial Sequence
  Description of Artificial Sequence: Synthetic oligonucleotide
  Target: COL7A1; (+) strand; PAM type: YTN; PAM sequence: TTG
cggtgcccacctctctccct

SEQ ID NO: 32492 - DNA, 20 bp, Artificial Sequence
  Description of Artificial Sequence: Synthetic oligonucleotide
  Target: COL7A1; (+) strand; PAM type: YTN; PAM sequence: CTC
tctccctgtgctgggctcgc

SEQ ID NO: 32493 - DNA, 20 bp, Artificial Sequence
  Description of Artificial Sequence: Synthetic oligonucleotide
  Target: COL7A1; (+) strand; PAM type: YTN; PAM sequence: CTC
tccctgtgctgggctcgcac

SEQ ID NO: 32494 - DNA, 20 bp, Artificial Sequence
  Description of Artificial Sequence: Synthetic oligonucleotide
  Target: COL7A1; (+) strand; PAM type: YTN; PAM sequence: CTC
cctgtgctgggctcgcactc

SEQ ID NO: 32495 - DNA, 20 bp, Artificial Sequence
  Description of Artificial Sequence: Synthetic oligonucleotide
  Target: COL7A1; (+) strand; PAM type: YTN; PAM sequence: CTG
tgctgggctcgcactcgggg

SEQ ID NO: 32496 - DNA, 20 bp, Artificial Sequence
  Description of Artificial Sequence: Synthetic oligonucleotide
  Target: COL7A1; (+) strand; PAM type: YTN; PAM sequence: CTG
ggctcgcactcggggcgcct

SEQ ID NO: 32497 - DNA, 20 bp, Artificial Sequence
  Description of Artificial Sequence: Synthetic oligonucleotide
  Target: COL7A1; (+) strand; PAM type: YTN; PAM sequence: CTC
gcactcggggcgcctctgcc

SEQ ID NO: 32498 - DNA, 20 bp, Artificial Sequence
  Description of Artificial Sequence: Synthetic oligonucleotide
  Target: COL7A1; (+) strand; PAM type: YTN; PAM sequence: CTC
ggggcgcctctgccaggatc

SEQ ID NO: 32499 - DNA, 20 bp, Artificial Sequence
  Description of Artificial Sequence: Synthetic oligonucleotide
  Target: COL7A1; (+) strand; PAM type: YTN; PAM sequence: CTC
tgccaggatcccggcgcaga

SEQ ID NO: 32500 - DNA, 20 bp, Artificial Sequence
  Description of Artificial Sequence: Synthetic oligonucleotide
  Target: COL7A1; (+) strand; PAM type: YTN; PAM sequence: CTG
ccaggatcccggcgcagagc

SEQ ID NO: 32501 - DNA, 20 bp, Artificial Sequence
  Description of Artificial Sequence: Synthetic oligonucleotide
  Target: COL7A1; (+) strand; PAM type: YTN; PAM sequence: CTA
ggcagtaaaagccgtcagct

SEQ ID NO: 32502 - DNA, 20 bp, Artificial Sequence
  Description of Artificial Sequence: Synthetic oligonucleotide
  Target: COL7A1; (+) strand; PAM type: YTN; PAM sequence: CTA
ggacccccgcctctgtccct

SEQ ID NO: 32503 - DNA, 20 bp, Artificial Sequence
  Description of Artificial Sequence: Synthetic oligonucleotide
  Target: COL7A1; (+) strand; PAM type: YTN; PAM sequence: CTC
tgtcccttgctcccccgtgg

SEQ ID NO: 32504 - DNA, 20 bp, Artificial Sequence
  Description of Artificial Sequence: Synthetic oligonucleotide
  Target: COL7A1; (+) strand; PAM type: YTN; PAM sequence: CTG
tcccttgctcccccgtggcc

SEQ ID NO: 32505 - DNA, 20 bp, Artificial Sequence
  Description of Artificial Sequence: Synthetic oligonucleotide
  Target: COL7A1; (+) strand; PAM type: YTN; PAM sequence: CTT
gctcccccgtggccttggca

SEQ ID NO: 32506 - DNA, 20 bp, Artificial Sequence
  Description of Artificial Sequence: Synthetic oligonucleotide
  Target: COL7A1; (+) strand; PAM type: YTN; PAM sequence: TTG
ctcccccgtggccttggcag

SEQ ID NO: 32507 - DNA, 20 bp, Artificial Sequence
  Description of Artificial Sequence: Synthetic oligonucleotide
  Target: COL7A1; (+) strand; PAM type: YTN; PAM sequence: CTC
ccccgtggccttggcaggtc

SEQ ID NO: 32508 - DNA, 20 bp, Artificial Sequence
  Description of Artificial Sequence: Synthetic oligonucleotide
  Target: COL7A1; (+) strand; PAM type: YTN; PAM sequence: CTT
ggcaggtccgagcccagcgc

SEQ ID NO: 32509 - DNA, 20 bp, Artificial Sequence
  Description of Artificial Sequence: Synthetic oligonucleotide
  Target: COL7A1; (+) strand; PAM type: YTN; PAM sequence: TTG
gcaggtccgagcccagcgcc

SEQ ID NO: 32510 - DNA, 20 bp, Artificial Sequence
  Description of Artificial Sequence: Synthetic oligonucleotide
  Target: COL7A1; (+) strand; PAM type: YTN; PAM sequence: CTC
cagcccgagtcctggtcttg

SEQ ID NO: 32511 - DNA, 20 bp, Artificial Sequence
  Description of Artificial Sequence: Synthetic oligonucleotide
  Target: COL7A1; (+) strand; PAM type: YTN; PAM sequence: CTG
gtcttgcctgcgcgtccgcc

SEQ ID NO: 32512 - DNA, 20 bp, Artificial Sequence
  Description of Artificial Sequence: Synthetic oligonucleotide
  Target: COL7A1; (+) strand; PAM type: YTN; PAM sequence: CTT
gcctgcgcgtccgcccgctc

SEQ ID NO: 32513 - DNA, 20 bp, Artificial Sequence
  Description of Artificial Sequence: Synthetic oligonucleotide
  Target: COL7A1; (+) strand; PAM type: YTN; PAM sequence: TTG
cctgcgcgtccgcccgctcc

SEQ ID NO: 32514 - DNA, 20 bp, Artificial Sequence
  Description of Artificial Sequence: Synthetic oligonucleotide
  Target: COL7A1; (+) strand; PAM type: YTN; PAM sequence: CTG
cgcgtccgcccgctcccgcc

SEQ ID NO: 32515 - DNA, 20 bp, Artificial Sequence
  Description of Artificial Sequence: Synthetic oligonucleotide
  Target: COL7A1; (+) strand; PAM type: YTN; PAM sequence: CTC
ccgccgccgccgctgcagtc

SEQ ID NO: 32516 - DNA, 20 bp, Artificial Sequence
  Description of Artificial Sequence: Synthetic oligonucleotide
  Target: COL7A1; (+) strand; PAM type: YTN; PAM sequence: CTG
cagtctctcgggcagagcag

SEQ ID NO: 32517 - DNA, 20 bp, Artificial Sequence
  Description of Artificial Sequence: Synthetic oligonucleotide
  Target: COL7A1; (+) strand; PAM type: YTN; PAM sequence: CTC
tcgggcagagcagagaaaag

SEQ ID NO: 32518 - DNA, 20 bp, Artificial Sequence
  Description of Artificial Sequence: Synthetic oligonucleotide
  Target: COL7A1; (+) strand; PAM type: YTN; PAM sequence: CTC
gggcagagcagagaaaagtc

SEQ ID NO: 32519 - DNA, 20 bp, Artificial Sequence
  Description of Artificial Sequence: Synthetic oligonucleotide
  Target: COL7A1; (+) strand; PAM type: YTN; PAM sequence: CTG
atctcggggggcggagcggc

SEQ ID NO: 32520 - DNA, 20 bp, Artificial Sequence
  Description of Artificial Sequence: Synthetic oligonucleotide
  Target: COL7A1; (+) strand; PAM type: YTN; PAM sequence: CTC
ggggggcggagcggcaggcg

SEQ ID NO: 32521 - DNA, 20 bp, Artificial Sequence
  Description of Artificial Sequence: Synthetic oligonucleotide
  Target: COL7A1; (+) strand; PAM type: YTN; PAM sequence: CTC
acccatatccctgagaggtc

SEQ ID NO: 32522 - DNA, 20 bp, Artificial Sequence
  Description of Artificial Sequence: Synthetic oligonucleotide
  Target: COL7A1; (+) strand; PAM type: YTN; PAM sequence: CTG
agaggtcgccgcccccccca

SEQ ID NO: 32523 - DNA, 20 bp, Artificial Sequence
  Description of Artificial Sequence: Synthetic oligonucleotide
  Target: COL7A1; (+) strand; PAM type: YTN; PAM sequence: CTC
ccccagacaaacgatatgac

SEQ ID NO: 32524 - DNA, 20 bp, Artificial Sequence
  Description of Artificial Sequence: Synthetic oligonucleotide
  Target: COL7A1; (+) strand; PAM type: YTN; PAM sequence: CTT
aactataaaccccccgaccc

SEQ ID NO: 32525 - DNA, 20 bp, Artificial Sequence
  Description of Artificial Sequence: Synthetic oligonucleotide
  Target: COL7A1; (+) strand; PAM type: YTN; PAM sequence: TTA
actataaaccccccgacccc

SEQ ID NO: 32526 - DNA, 20 bp, Artificial Sequence
  Description of Artificial Sequence: Synthetic oligonucleotide
  Target: COL7A1; (+) strand; PAM type: YTN; PAM sequence: CTA
taaaccccccgaccccccgt

SEQ ID NO: 32527 - DNA, 20 bp, Artificial Sequence
  Description of Artificial Sequence: Synthetic oligonucleotide
  Target: COL7A1; (+) strand; PAM type: YTN; PAM sequence: CTT
ctgggaatttcccagaaggt

SEQ ID NO: 32528 - DNA, 20 bp, Artificial Sequence
  Description of Artificial Sequence: Synthetic oligonucleotide
  Target: COL7A1; (+) strand; PAM type: YTN; PAM sequence: TTC
tgggaatttcccagaaggtt

SEQ ID NO: 32529 - DNA, 20 bp, Artificial Sequence
  Description of Artificial Sequence: Synthetic oligonucleotide
  Target: COL7A1; (+) strand; PAM type: YTN; PAM sequence: CTG
ggaatttcccagaaggttct

SEQ ID NO: 32530 - DNA, 20 bp, Artificial Sequence
  Description of Artificial Sequence: Synthetic oligonucleotide
  Target: COL7A1; (+) strand; PAM type: YTN; PAM sequence: TTT
cccagaaggttctgcatggg

SEQ ID NO: 32531 - DNA, 20 bp, Artificial Sequence
  Description of Artificial Sequence: Synthetic oligonucleotide
  Target: COL7A1; (+) strand; PAM type: YTN; PAM sequence: TTC
ccagaaggttctgcatgggc

SEQ ID NO: 32532 - DNA, 20 bp, Artificial Sequence
  Description of Artificial Sequence: Synthetic oligonucleotide
  Target: COL7A1; (+) strand; PAM type: YTN; PAM sequence: TTC
tgcatgggcagatgctgagg

SEQ ID NO: 32533 - DNA, 20 bp, Artificial Sequence
  Description of Artificial Sequence: Synthetic oligonucleotide
  Target: COL7A1; (+) strand; PAM type: YTN; PAM sequence: CTG
catgggcagatgctgaggga

SEQ ID NO: 32534 - DNA, 20 bp, Artificial Sequence
  Description of Artificial Sequence: Synthetic oligonucleotide
  Target: COL7A1; (+) strand; PAM type: YTN; PAM sequence: CTG
agggagtacccctaactcca

SEQ ID NO: 32535 - DNA, 20 bp, Artificial Sequence
  Description of Artificial Sequence: Synthetic oligonucleotide
  Target: COL7A1; (+) strand; PAM type: YTN; PAM sequence: CTA
actccatctaaggtcacagg

SEQ ID NO: 32536 - DNA, 20 bp, Artificial Sequence
  Description of Artificial Sequence: Synthetic oligonucleotide
  Target: COL7A1; (+) strand; PAM type: YTN; PAM sequence: CTC
catctaaggtcacaggtctt

SEQ ID NO: 32537 - DNA, 20 bp, Artificial Sequence
  Description of Artificial Sequence: Synthetic oligonucleotide
  Target: COL7A1; (+) strand; PAM type: YTN; PAM sequence: CTA
aggtcacaggtcttggctgc

SEQ ID NO: 32538 - DNA, 20 bp, Artificial Sequence
  Description of Artificial Sequence: Synthetic oligonucleotide
  Target: COL7A1; (+) strand; PAM type: YTN; PAM sequence: CTT
ggctgctttaggtcaatcac

SEQ ID NO: 32539 - DNA, 20 bp, Artificial Sequence
  Description of Artificial Sequence: Synthetic oligonucleotide
  Target: COL7A1; (+) strand; PAM type: YTN; PAM sequence: TTG
gctgctttaggtcaatcaca

SEQ ID NO: 32540 - DNA, 20 bp, Artificial Sequence
  Description of Artificial Sequence: Synthetic oligonucleotide
  Target: COL7A1; (+) strand; PAM type: YTN; PAM sequence: CTG
ctttaggtcaatcacagtga

SEQ ID NO: 32541 - DNA, 20 bp, Artificial Sequence
  Description of Artificial Sequence: Synthetic oligonucleotide
  Target: COL7A1; (+) strand; PAM type: YTN; PAM sequence: CTT
taggtcaatcacagtgacca

SEQ ID NO: 32542 - DNA, 20 bp, Artificial Sequence
  Description of Artificial Sequence: Synthetic oligonucleotide
  Target: COL7A1; (+) strand; PAM type: YTN; PAM sequence: TTT
aggtcaatcacagtgaccag

SEQ ID NO: 32543 - DNA, 20 bp, Artificial Sequence
  Description of Artificial Sequence: Synthetic oligonucleotide
  Target: COL7A1; (+) strand; PAM type: YTN; PAM sequence: TTA
ggtcaatcacagtgaccagg

SEQ ID NO: 32544 - DNA, 20 bp, Artificial Sequence
  Description of Artificial Sequence: Synthetic oligonucleotide
  Target: COL7A1; (+) strand; PAM type: YTN; PAM sequence: CTG
aggagtggacaggttcctgc

SEQ ID NO: 32545 - DNA, 20 bp, Artificial Sequence
  Description of Artificial Sequence: Synthetic oligonucleotide
  Target: COL7A1; (+) strand; PAM type: YTN; PAM sequence: TTC
ctgcagagccacaaggcagc

SEQ ID NO: 32546 - DNA, 20 bp, Artificial Sequence
  Description of Artificial Sequence: Synthetic oligonucleotide
  Target: COL7A1; (+) strand; PAM type: YTN; PAM sequence: CTG
cagagccacaaggcagcagc

SEQ ID NO: 32547 - DNA, 20 bp, Artificial Sequence
  Description of Artificial Sequence: Synthetic oligonucleotide
  Target: COL7A1; (+) strand; PAM type: YTN; PAM sequence: CTG
cagttggggatgactcaccc

SEQ ID NO: 32548 - DNA, 20 bp, Artificial Sequence
  Description of Artificial Sequence: Synthetic oligonucleotide
  Target: COL7A1; (+) strand; PAM type: YTN; PAM sequence: TTG
gggatgactcacccccaatc

SEQ ID NO: 32549 - DNA, 20 bp, Artificial Sequence
  Description of Artificial Sequence: Synthetic oligonucleotide
  Target: COL7A1; (+) strand; PAM type: YTN; PAM sequence: CTC
acccccaatccagtgggggt

SEQ ID NO: 32550 - DNA, 20 bp, Artificial Sequence
  Description of Artificial Sequence: Synthetic oligonucleotide
  Target: COL7A1; (+) strand; PAM type: YTN; PAM sequence: CTC
aggccatgggtcccgccggc

SEQ ID NO: 32551 - DNA, 20 bp, Artificial Sequence
  Description of Artificial Sequence: Synthetic oligonucleotide
  Target: COL7A1; (+) strand; PAM type: YTN; PAM sequence: CTC
ctgtgattcagccatctgtc

SEQ ID NO: 32552 - DNA, 20 bp, Artificial Sequence
  Description of Artificial Sequence: Synthetic oligonucleotide
  Target: COL7A1; (+) strand; PAM type: YTN; PAM sequence: CTG
tgattcagccatctgtctgg

SEQ ID NO: 32553 - DNA, 20 bp, Artificial Sequence
  Description of Artificial Sequence: Synthetic oligonucleotide
  Target: COL7A1; (+) strand; PAM type: YTN; PAM sequence: TTC
agccatctgtctggtgggcc

SEQ ID NO: 32554 - DNA, 20 bp, Artificial Sequence
  Description of Artificial Sequence: Synthetic oligonucleotide
  Target: COL7A1; (+) strand; PAM type: YTN; PAM sequence: CTG
tctggtgggcctcctgggcc

SEQ ID NO: 32555 - DNA, 20 bp, Artificial Sequence
  Description of Artificial Sequence: Synthetic oligonucleotide
  Target: COL7A1; (+) strand; PAM type: YTN; PAM sequence: CTG
gtgggcctcctgggccccac

SEQ ID NO: 32556 - DNA, 20 bp, Artificial Sequence
  Description of Artificial Sequence: Synthetic oligonucleotide
  Target: COL7A1; (+) strand; PAM type: YTN; PAM sequence: CTC
ctgggccccacccggatctc

SEQ ID NO: 32557 - DNA, 20 bp, Artificial Sequence
  Description of Artificial Sequence: Synthetic oligonucleotide
  Target: COL7A1; (+) strand; PAM type: YTN; PAM sequence: CTG
ggccccacccggatctcctt

SEQ ID NO: 32558 - DNA, 20 bp, Artificial Sequence
  Description of Artificial Sequence: Synthetic oligonucleotide
  Target: COL7A1; (+) strand; PAM type: YTN; PAM sequence: CTC
cttgacaggcaagaagccct

SEQ ID NO: 32559 - DNA, 20 bp, Artificial Sequence
  Description of Artificial Sequence: Synthetic oligonucleotide
  Target: COL7A1; (+) strand; PAM type: YTN; PAM sequence: CTT
gacaggcaagaagccctggc

SEQ ID NO: 32560 - DNA, 20 bp, Artificial Sequence
  Description of Artificial Sequence: Synthetic oligonucleotide
  Target: COL7A1; (+) strand; PAM type: YTN; PAM sequence: TTG
acaggcaagaagccctggca

SEQ ID NO: 32561 - DNA, 20 bp, Artificial Sequence
  Description of Artificial Sequence: Synthetic oligonucleotide
  Target: COL7A1; (+) strand; PAM type: YTN; PAM sequence: CTG
gcaaatgagtgactctgggc

SEQ ID NO: 32562 - DNA, 20 bp, Artificial Sequence
  Description of Artificial Sequence: Synthetic oligonucleotide
  Target: COL7A1; (+) strand; PAM type: YTN; PAM sequence: CTC
tgggccggtcttagggaaac

SEQ ID NO: 32563 - DNA, 20 bp, Artificial Sequence
  Description of Artificial Sequence: Synthetic oligonucleotide
  Target: COL7A1; (+) strand; PAM type: YTN; PAM sequence: CTG
ggccggtcttagggaaacca

SEQ ID NO: 32564 - DNA, 20 bp, Artificial Sequence
  Description of Artificial Sequence: Synthetic oligonucleotide
  Target: COL7A1; (+) strand; PAM type: YTN; PAM sequence: CTT
agggaaaccaaggtcccctt

SEQ ID NO: 32565 - DNA, 20 bp, Artificial Sequence
  Description of Artificial Sequence: Synthetic oligonucleotide
  Target: COL7A1; (+) strand; PAM type: YTN; PAM sequence: TTA
gggaaaccaaggtccccttg

SEQ ID NO: 32566 - DNA, 20 bp, Artificial Sequence
  Description of Artificial Sequence: Synthetic oligonucleotide
  Target: COL7A1; (+) strand; PAM type: YTN; PAM sequence: CTT
ggcctggatccaagtaactc

SEQ ID NO: 32567 - DNA, 20 bp, Artificial Sequence
  Description of Artificial Sequence: Synthetic oligonucleotide
  Target: COL7A1; (+) strand; PAM type: YTN; PAM sequence: TTG
gcctggatccaagtaactca

SEQ ID NO: 32568 - DNA, 20 bp, Artificial Sequence
  Description of Artificial Sequence: Synthetic oligonucleotide
  Target: COL7A1; (+) strand; PAM type: YTN; PAM sequence: CTG
gatccaagtaactcaccccc

SEQ ID NO: 32569 - DNA, 20 bp, Artificial Sequence
  Description of Artificial Sequence: Synthetic oligonucleotide
  Target: COL7A1; (+) strand; PAM type: YTN; PAM sequence: CTC
accccctctttgtaggggat

SEQ ID NO: 32570 - DNA, 20 bp, Artificial Sequence
  Description of Artificial Sequence: Synthetic oligonucleotide
  Target: COL7A1; (+) strand; PAM type: YTN; PAM sequence: CTC
tttgtaggggataagccgga

SEQ ID NO: 32571 - DNA, 20 bp, Artificial Sequence
  Description of Artificial Sequence: Synthetic oligonucleotide
  Target: COL7A1; (+) strand; PAM type: YTN; PAM sequence: CTT
tgtaggggataagccggaag

SEQ ID NO: 32572 - DNA, 20 bp, Artificial Sequence
  Description of Artificial Sequence: Synthetic oligonucleotide
  Target: COL7A1; (+) strand; PAM type: YTN; PAM sequence: TTT
gtaggggataagccggaagg

SEQ ID NO: 32573 - DNA, 20 bp, Artificial Sequence
  Description of Artificial Sequence: Synthetic oligonucleotide
  Target: COL7A1; (+) strand; PAM type: YTN; PAM sequence: TTG
taggggataagccggaagga

SEQ ID NO: 32574 - DNA, 20 bp, Artificial Sequence
  Description of Artificial Sequence: Synthetic oligonucleotide
  Target: COL7A1; (+) strand; PAM type: YTN; PAM sequence: CTG
tgtcatgcttatgcatacat

SEQ ID NO: 32575 - DNA, 20 bp, Artificial Sequence
  Description of Artificial Sequence: Synthetic oligonucleotide
  Target: COL7A1; (+) strand; PAM type: YTN; PAM sequence: CTT
atgcatacatcccagtgtcc

SEQ ID NO: 32576 - DNA, 20 bp, Artificial Sequence
  Description of Artificial Sequence: Synthetic oligonucleotide
  Target: COL7A1; (+) strand; PAM type: YTN; PAM sequence: TTA
tgcatacatcccagtgtccc

SEQ ID NO: 32577 - DNA, 20 bp, Artificial Sequence
  Description of Artificial Sequence: Synthetic oligonucleotide
  Target: COL7A1; (+) strand; PAM type: YTN; PAM sequence: CTA
ccatgtcacaggcagatgca

SEQ ID NO: 32578 - DNA, 20 bp, Artificial Sequence
  Description of Artificial Sequence: Synthetic oligonucleotide
  Target: COL7A1; (+) strand; PAM type: YTN; PAM sequence: CTG
tgcctgcagggagggggccg

SEQ ID NO: 32579 - DNA, 20 bp, Artificial Sequence
  Description of Artificial Sequence: Synthetic oligonucleotide
  Target: COL7A1; (+) strand; PAM type: YTN; PAM sequence: CTG
cagggagggggccgcccatc

SEQ ID NO: 32580 - DNA, 20 bp, Artificial Sequence
  Description of Artificial Sequence: Synthetic oligonucleotide
  Target: COL7A1; (+) strand; PAM type: YTN; PAM sequence: CTG
tggagggcgggaccacccac

SEQ ID NO: 32581 - DNA, 20 bp, Artificial Sequence
  Description of Artificial Sequence: Synthetic oligonucleotide
  Target: COL7A1; (+) strand; PAM type: YTN; PAM sequence: CTC
atctctcaggaatcgagccc

SEQ ID NO: 32582 - DNA, 20 bp, Artificial Sequence
  Description of Artificial Sequence: Synthetic oligonucleotide
  Target: COL7A1; (+) strand; PAM type: YTN; PAM sequence: CTC
tcaggaatcgagccctccat

SEQ ID NO: 32583 - DNA, 20 bp, Artificial Sequence
  Description of Artificial Sequence: Synthetic oligonucleotide
  Target: COL7A1; (+) strand; PAM type: YTN; PAM sequence: CTC
aggaatcgagccctccatgc

SEQ ID NO: 32584 - DNA, 20 bp, Artificial Sequence
  Description of Artificial Sequence: Synthetic oligonucleotide
  Target: COL7A1; (+) strand; PAM type: YTN; PAM sequence: CTC
catgccccaggccaggtccc

SEQ ID NO: 32585 - DNA, 20 bp, Artificial Sequence
  Description of Artificial Sequence: Synthetic oligonucleotide
  Target: COL7A1; (+) strand; PAM type: YTN; PAM sequence: CTA
cctacatgtcctcacccaca

SEQ ID NO: 32586 - DNA, 20 bp, Artificial Sequence
  Description of Artificial Sequence: Synthetic oligonucleotide
  Target: COL7A1; (+) strand; PAM type: YTN; PAM sequence: CTA
catgtcctcacccacaggca

SEQ ID NO: 32587 - DNA, 20 bp, Artificial Sequence
  Description of Artificial Sequence: Synthetic oligonucleotide
  Target: COL7A1; (+) strand; PAM type: YTN; PAM sequence: CTC
acccacaggcatcctctcct

SEQ ID NO: 32588 - DNA, 20 bp, Artificial Sequence
  Description of Artificial Sequence: Synthetic oligonucleotide
  Target: COL7A1; (+) strand; PAM type: YTN; PAM sequence: CTC
tccttccatctacttttctt

SEQ ID NO: 32589 - DNA, 20 bp, Artificial Sequence
  Description of Artificial Sequence: Synthetic oligonucleotide
  Target: COL7A1; (+) strand; PAM type: YTN; PAM sequence: CTC
cttccatctacttttcttgt

SEQ ID NO: 32590 - DNA, 20 bp, Artificial Sequence
  Description of Artificial Sequence: Synthetic oligonucleotide
  Target: COL7A1; (+) strand; PAM type: YTN; PAM sequence: CTT
ccatctacttttcttgtagg

SEQ ID NO: 32591 - DNA, 20 bp, Artificial Sequence
  Description of Artificial Sequence: Synthetic oligonucleotide
  Target: COL7A1; (+) strand; PAM type: YTN; PAM sequence: TTC
catctacttttcttgtaggt

SEQ ID NO: 32592 - DNA, 20 bp, Artificial Sequence
  Description of Artificial Sequence: Synthetic oligonucleotide
  Target: COL7A1; (+) strand; PAM type: YTN; PAM sequence: CTA
cttttcttgtaggtccctgc

SEQ ID NO: 32593 - DNA, 20 bp, Artificial Sequence
  Description of Artificial Sequence: Synthetic oligonucleotide
  Target: COL7A1; (+) strand; PAM type: YTN; PAM sequence: CTT
ttcttgtaggtccctgccac

SEQ ID NO: 32594 - DNA, 20 bp, Artificial Sequence
  Description of Artificial Sequence: Synthetic oligonucleotide
  Target: COL7A1; (+) strand; PAM type: YTN; PAM sequence: TTT
tcttgtaggtccctgccacc

SEQ ID NO: 32595 - DNA, 20 bp, Artificial Sequence
  Description of Artificial Sequence: Synthetic oligonucleotide
  Target: COL7A1; (+) strand; PAM type: YTN; PAM sequence: TTT
cttgtaggtccctgccaccc

SEQ ID NO: 32596 - DNA, 20 bp, Artificial Sequence
  Description of Artificial Sequence: Synthetic oligonucleotide
  Target: COL7A1; (+) strand; PAM type: YTN; PAM sequence: TTC
ttgtaggtccctgccaccca

SEQ ID NO: 32597 - DNA, 20 bp, Artificial Sequence
  Description of Artificial Sequence: Synthetic oligonucleotide
  Target: COL7A1; (+) strand; PAM type: YTN; PAM sequence: CTT
gtaggtccctgccacccatc

SEQ ID NO: 32598 - DNA, 20 bp, Artificial Sequence
  Description of Artificial Sequence: Synthetic oligonucleotide
  Target: COL7A1; (+) strand; PAM type: YTN; PAM sequence: TTG
taggtccctgccacccatct

SEQ ID NO: 32599 - DNA, 20 bp, Artificial Sequence
  Description of Artificial Sequence: Synthetic oligonucleotide
  Target: COL7A1; (+) strand; PAM type: YTN; PAM sequence: CTG
ccacccatctcccctaccag

SEQ ID NO: 32600 - DNA, 20 bp, Artificial Sequence
  Description of Artificial Sequence: Synthetic oligonucleotide
  Target: COL7A1; (+) strand; PAM type: YTN; PAM sequence: CTC
ccctaccaggccgaggtccc

SEQ ID NO: 32601 - DNA, 20 bp, Artificial Sequence
  Description of Artificial Sequence: Synthetic oligonucleotide
  Target: COL7A1; (+) strand; PAM type: YTN; PAM sequence: CTA
ccaggccgaggtccccttgg

SEQ ID NO: 32602 - DNA, 20 bp, Artificial Sequence
  Description of Artificial Sequence: Synthetic oligonucleotide
  Target: COL7A1; (+) strand; PAM type: YTN; PAM sequence: CTT
gggccccttcctcctttcct

SEQ ID NO: 32603 - DNA, 20 bp, Artificial Sequence
  Description of Artificial Sequence: Synthetic oligonucleotide
  Target: COL7A1; (+) strand; PAM type: YTN; PAM sequence: TTG
ggccccttcctcctttcctc

SEQ ID NO: 32604 - DNA, 20 bp, Artificial Sequence
  Description of Artificial Sequence: Synthetic oligonucleotide
  Target: COL7A1; (+) strand; PAM type: YTN; PAM sequence: CTT
cctcctttcctcactgccct

SEQ ID NO: 32605 - DNA, 20 bp, Artificial Sequence
  Description of Artificial Sequence: Synthetic oligonucleotide
  Target: COL7A1; (+) strand; PAM type: YTN; PAM sequence: TTC
ctcctttcctcactgccctc

SEQ ID NO: 32606 - DNA, 20 bp, Artificial Sequence
  Description of Artificial Sequence: Synthetic oligonucleotide
  Target: COL7A1; (+) strand; PAM type: YTN; PAM sequence: CTC
ctttcctcactgccctcatg

SEQ ID NO: 32607 - DNA, 20 bp, Artificial Sequence
  Description of Artificial Sequence: Synthetic oligonucleotide
  Target: COL7A1; (+) strand; PAM type: YTN; PAM sequence: CTT
tcctcactgccctcatggta

SEQ ID NO: 32608 - DNA, 20 bp, Artificial Sequence
  Description of Artificial Sequence: Synthetic oligonucleotide
  Target: COL7A1; (+) strand; PAM type: YTN; PAM sequence: TTT
cctcactgccctcatggtac

SEQ ID NO: 32609 - DNA, 20 bp, Artificial Sequence
  Description of Artificial Sequence: Synthetic oligonucleotide
  Target: COL7A1; (+) strand; PAM type: YTN; PAM sequence: TTC
ctcactgccctcatggtacc

SEQ ID NO: 32610 - DNA, 20 bp, Artificial Sequence
  Description of Artificial Sequence: Synthetic oligonucleotide
  Target: COL7A1; (+) strand; PAM type: YTN; PAM sequence: CTC
actgccctcatggtacctgt

SEQ ID NO: 32611 - DNA, 20 bp, Artificial Sequence
  Description of Artificial Sequence: Synthetic oligonucleotide
  Target: COL7A1; (+) strand; PAM type: YTN; PAM sequence: CTG
ccctcatggtacctgtagct

SEQ ID NO: 32612 - DNA, 20 bp, Artificial Sequence
  Description of Artificial Sequence: Synthetic oligonucleotide
  Target: COL7A1; (+) strand; PAM type: YTN; PAM sequence: CTC
atggtacctgtagcttccag

SEQ ID NO: 32613 - DNA, 20 bp, Artificial Sequence
  Description of Artificial Sequence: Synthetic oligonucleotide
  Target: COL7A1; (+) strand; PAM type: YTN; PAM sequence: CTG
tagcttccagcttcataact

SEQ ID NO: 32614 - DNA, 20 bp, Artificial Sequence
  Description of Artificial Sequence: Synthetic oligonucleotide
  Target: COL7A1; (+) strand; PAM type: YTN; PAM sequence: CTT
ccagcttcataactgccccc

SEQ ID NO: 32615 - DNA, 20 bp, Artificial Sequence
  Description of Artificial Sequence: Synthetic oligonucleotide
  Target: COL7A1; (+) strand; PAM type: YTN; PAM sequence: TTC
cagcttcataactgccccct

SEQ ID NO: 32616 - DNA, 20 bp, Artificial Sequence
  Description of Artificial Sequence: Synthetic oligonucleotide
  Target: COL7A1; (+) strand; PAM type: YTN; PAM sequence: CTT
cataactgccccctacctta

SEQ ID NO: 32617 - DNA, 20 bp, Artificial Sequence
  Description of Artificial Sequence: Synthetic oligonucleotide
  Target: COL7A1; (+) strand; PAM type: YTN; PAM sequence: TTC
ataactgccccctaccttac

SEQ ID NO: 32618 - DNA, 20 bp, Artificial Sequence
  Description of Artificial Sequence: Synthetic oligonucleotide
  Target: COL7A1; (+) strand; PAM type: YTN; PAM sequence: CTG
ccccctaccttactcctgtc

SEQ ID NO: 32619 - DNA, 20 bp, Artificial Sequence
  Description of Artificial Sequence: Synthetic oligonucleotide
  Target: COL7A1; (+) strand; PAM type: YTN; PAM sequence: CTA
ccttactcctgtccccttac

SEQ ID NO: 32620 - DNA, 20 bp, Artificial Sequence
  Description of Artificial Sequence: Synthetic oligonucleotide
  Target: COL7A1; (+) strand; PAM type: YTN; PAM sequence: CTT
actcctgtccccttacccag

SEQ ID NO: 32621 - DNA, 20 bp, Artificial Sequence
  Description of Artificial Sequence: Synthetic oligonucleotide
  Target: COL7A1; (+) strand; PAM type: YTN; PAM sequence: TTA
ctcctgtccccttacccagg

SEQ ID NO: 32622 - DNA, 20 bp, Artificial Sequence
  Description of Artificial Sequence: Synthetic oligonucleotide
  Target: COL7A1; (+) strand; PAM type: YTN; PAM sequence: CTC
ctgtccccttacccaggctg

SEQ ID NO: 32623 - DNA, 20 bp, Artificial Sequence
  Description of Artificial Sequence: Synthetic oligonucleotide
  Target: COL7A1; (+) strand; PAM type: YTN; PAM sequence: CTG
tccccttacccaggctgact

SEQ ID NO: 32624 - DNA, 20 bp, Artificial Sequence
  Description of Artificial Sequence: Synthetic oligonucleotide
  Target: COL7A1; (+) strand; PAM type: YTN; PAM sequence: CTT
acccaggctgacttcacacc

SEQ ID NO: 32625 - DNA, 20 bp, Artificial Sequence
  Description of Artificial Sequence: Synthetic oligonucleotide
  Target: COL7A1; (+) strand; PAM type: YTN; PAM sequence: TTA
cccaggctgacttcacaccc

SEQ ID NO: 32626 - DNA, 20 bp, Artificial Sequence
  Description of Artificial Sequence: Synthetic oligonucleotide
  Target: COL7A1; (+) strand; PAM type: YTN; PAM sequence: CTG
acttcacaccctcccccagc

SEQ ID NO: 32627 - DNA, 20 bp, Artificial Sequence
  Description of Artificial Sequence: Synthetic oligonucleotide
  Target: COL7A1; (+) strand; PAM type: YTN; PAM sequence: CTT
cacaccctcccccagcttcg

SEQ ID NO: 32628 - DNA, 20 bp, Artificial Sequence
  Description of Artificial Sequence: Synthetic oligonucleotide
  Target: COL7A1; (+) strand; PAM type: YTN; PAM sequence: TTC
acaccctcccccagcttcgc

SEQ ID NO: 32629 - DNA, 20 bp, Artificial Sequence
  Description of Artificial Sequence: Synthetic oligonucleotide
  Target: COL7A1; (+) strand; PAM type: YTN; PAM sequence: CTC
ccccagcttcgcttctgagg

SEQ ID NO: 32630 - DNA, 20 bp, Artificial Sequence
  Description of Artificial Sequence: Synthetic oligonucleotide
  Target: COL7A1; (+) strand; PAM type: YTN; PAM sequence: CTT
cgcttctgaggctgtggaca

SEQ ID NO: 32631 - DNA, 20 bp, Artificial Sequence
  Description of Artificial Sequence: Synthetic oligonucleotide
  Target: COL7A1; (+) strand; PAM type: YTN; PAM sequence: TTC
gcttctgaggctgtggacag

SEQ ID NO: 32632 - DNA, 20 bp, Artificial Sequence
  Description of Artificial Sequence: Synthetic oligonucleotide
  Target: COL7A1; (+) strand; PAM type: YTN; PAM sequence: CTT
ctgaggctgtggacagtcct

SEQ ID NO: 32633 - DNA, 20 bp, Artificial Sequence
  Description of Artificial Sequence: Synthetic oligonucleotide
  Target: COL7A1; (+) strand; PAM type: YTN; PAM sequence: TTC
tgaggctgtggacagtcctc

SEQ ID NO: 32634 - DNA, 20 bp, Artificial Sequence
  Description of Artificial Sequence: Synthetic oligonucleotide
  Target: COL7A1; (+) strand; PAM type: YTN; PAM sequence: CTG
aggctgtggacagtcctcca

SEQ ID NO: 32635 - DNA, 20 bp, Artificial Sequence
  Description of Artificial Sequence: Synthetic oligonucleotide
  Target: COL7A1; (+) strand; PAM type: YTN; PAM sequence: CTG
tggacagtcctccaacacac

SEQ ID NO: 32636 - DNA, 20 bp, Artificial Sequence
  Description of Artificial Sequence: Synthetic oligonucleotide
  Target: COL7A1; (+) strand; PAM type: YTN; PAM sequence: CTC
caacacacaccacgccaggg

SEQ ID NO: 32637 - DNA, 20 bp, Artificial Sequence
  Description of Artificial Sequence: Synthetic oligonucleotide
  Target: COL7A1; (+) strand; PAM type: YTN; PAM sequence: CTG
tccgaaggaggtggggctct

SEQ ID NO: 32638 - DNA, 20 bp, Artificial Sequence
  Description of Artificial Sequence: Synthetic oligonucleotide
  Target: COL7A1; (+) strand; PAM type: YTN; PAM sequence: CTC
tgtatatgcatatctctcca

SEQ ID NO: 32639 - DNA, 20 bp, Artificial Sequence
  Description of Artificial Sequence: Synthetic oligonucleotide
  Target: COL7A1; (+) strand; PAM type: YTN; PAM sequence: CTG
tatatgcatatctctccatt

SEQ ID NO: 32640 - DNA, 20 bp, Artificial Sequence
  Description of Artificial Sequence: Synthetic oligonucleotide
  Target: COL7A1; (+) strand; PAM type: YTN; PAM sequence: CTC
tccattagatgggtgacact

SEQ ID NO: 32641 - DNA, 20 bp, Artificial Sequence
  Description of Artificial Sequence: Synthetic oligonucleotide
  Target: COL7A1; (+) strand; PAM type: YTN; PAM sequence: CTC
cattagatgggtgacactaa

SEQ ID NO: 32642 - DNA, 20 bp, Artificial Sequence
  Description of Artificial Sequence: Synthetic oligonucleotide
  Target: COL7A1; (+) strand; PAM type: YTN; PAM sequence: TTA
gatgggtgacactaaggcag

SEQ ID NO: 32643 - DNA, 20 bp, Artificial Sequence
  Description of Artificial Sequence: Synthetic oligonucleotide
  Target: COL7A1; (+) strand; PAM type: YTN; PAM sequence: CTA
aggcagagaggcactgctaa

SEQ ID NO: 32644 - DNA, 20 bp, Artificial Sequence
  Description of Artificial Sequence: Synthetic oligonucleotide
  Target: COL7A1; (+) strand; PAM type: YTN; PAM sequence: CTG
ctaagaagggcaggccccca

SEQ ID NO: 32645 - DNA, 20 bp, Artificial Sequence
  Description of Artificial Sequence: Synthetic oligonucleotide
  Target: COL7A1; (+) strand; PAM type: YTN; PAM sequence: CTA
agaagggcaggcccccatct

SEQ ID NO: 32646 - DNA, 20 bp, Artificial Sequence
  Description of Artificial Sequence: Synthetic oligonucleotide
  Target: COL7A1; (+) strand; PAM type: YTN; PAM sequence: CTG
ggtcctgctccccctttttt

SEQ ID NO: 32647 - DNA, 20 bp, Artificial Sequence
  Description of Artificial Sequence: Synthetic oligonucleotide
  Target: COL7A1; (+) strand; PAM type: YTN; PAM sequence: CTG
ctccccctttttttcctgct

SEQ ID NO: 32648 - DNA, 20 bp, Artificial Sequence
  Description of Artificial Sequence: Synthetic oligonucleotide
  Target: COL7A1; (+) strand; PAM type: YTN; PAM sequence: CTC
cccctttttttcctgctaat

SEQ ID NO: 32649 - DNA, 20 bp, Artificial Sequence
  Description of Artificial Sequence: Synthetic oligonucleotide
  Target: COL7A1; (+) strand; PAM type: YTN; PAM sequence: CTT
tttttcctgctaatcctgaa

SEQ ID NO: 32650 - DNA, 20 bp, Artificial Sequence
  Description of Artificial Sequence: Synthetic oligonucleotide
  Target: COL7A1; (+) strand; PAM type: YTN; PAM sequence: TTT
ttttcctgctaatcctgaat

SEQ ID NO: 32651 - DNA, 20 bp, Artificial Sequence
  Description of Artificial Sequence: Synthetic oligonucleotide
  Target: COL7A1; (+) strand; PAM type: YTN; PAM sequence: TTT
tttcctgctaatcctgaata

SEQ ID NO: 32652 - DNA, 20 bp, Artificial Sequence
  Description of Artificial Sequence: Synthetic oligonucleotide
  Target: COL7A1; (+) strand; PAM type: YTN; PAM sequence: TTT
ttcctgctaatcctgaataa

SEQ ID NO: 32653 - DNA, 20 bp, Artificial Sequence
  Description of Artificial Sequence: Synthetic oligonucleotide
  Target: COL7A1; (+) strand; PAM type: YTN; PAM sequence: TTT
tcctgctaatcctgaataac

SEQ ID NO: 32654 - DNA, 20 bp, Artificial Sequence
  Description of Artificial Sequence: Synthetic oligonucleotide
  Target: COL7A1; (+) strand; PAM type: YTN; PAM sequence: TTT
cctgctaatcctgaataact

SEQ ID NO: 32655 - DNA, 20 bp, Artificial Sequence
  Description of Artificial Sequence: Synthetic oligonucleotide
  Target: COL7A1; (+) strand; PAM type: YTN; PAM sequence: TTC
ctgctaatcctgaataactc

SEQ ID NO: 32656 - DNA, 20 bp, Artificial Sequence
  Description of Artificial Sequence: Synthetic oligonucleotide
  Target: COL7A1; (+) strand; PAM type: YTN; PAM sequence: CTG
ctaatcctgaataactctgg

SEQ ID NO: 32657 - DNA, 20 bp, Artificial Sequence
  Description of Artificial Sequence: Synthetic oligonucleotide
  Target: COL7A1; (+) strand; PAM type: YTN; PAM sequence: CTA
atcctgaataactctgggca

SEQ ID NO: 32658 - DNA, 20 bp, Artificial Sequence
  Description of Artificial Sequence: Synthetic oligonucleotide
  Target: COL7A1; (+) strand; PAM type: YTN; PAM sequence: CTG
aataactctgggcagcccag

SEQ ID NO: 32659 - DNA, 20 bp, Artificial Sequence
  Description of Artificial Sequence: Synthetic oligonucleotide
  Target: COL7A1; (+) strand; PAM type: YTN; PAM sequence: CTC
tgggcagcccagaaagcaca

SEQ ID NO: 32660 - DNA, 20 bp, Artificial Sequence
  Description of Artificial Sequence: Synthetic oligonucleotide
  Target: COL7A1; (+) strand; PAM type: YTN; PAM sequence: CTG
ggcagcccagaaagcacatc

SEQ ID NO: 32661 - DNA, 20 bp, Artificial Sequence
  Description of Artificial Sequence: Synthetic oligonucleotide
  Target: COL7A1; (+) strand; PAM type: YTN; PAM sequence: CTA
tactcaccaaggctgctggg

SEQ ID NO: 32662 - DNA, 20 bp, Artificial Sequence
  Description of Artificial Sequence: Synthetic oligonucleotide
  Target: COL7A1; (+) strand; PAM type: YTN; PAM sequence: CTC
accaaggctgctgggcccct

SEQ ID NO: 32663 - DNA, 20 bp, Artificial Sequence
  Description of Artificial Sequence: Synthetic oligonucleotide
  Target: COL7A1; (+) strand; PAM type: YTN; PAM sequence: CTG
ctgggccccttctaatatgc

SEQ ID NO: 32664 - DNA, 20 bp, Artificial Sequence
  Description of Artificial Sequence: Synthetic oligonucleotide
  Target: COL7A1; (+) strand; PAM type: YTN; PAM sequence: CTG
ggccccttctaatatgcccg

SEQ ID NO: 32665 - DNA, 20 bp, Artificial Sequence
  Description of Artificial Sequence: Synthetic oligonucleotide
  Target: COL7A1; (+) strand; PAM type: YTN; PAM sequence: CTT
ctaatatgcccggccccaca

SEQ ID NO: 32666 - DNA, 20 bp, Artificial Sequence
  Description of Artificial Sequence: Synthetic oligonucleotide
  Target: COL7A1; (+) strand; PAM type: YTN; PAM sequence: TTC
taatatgcccggccccacag

SEQ ID NO: 32667 - DNA, 20 bp, Artificial Sequence
  Description of Artificial Sequence: Synthetic oligonucleotide
  Target: COL7A1; (+) strand; PAM type: YTN; PAM sequence: CTA
atatgcccggccccacagcc

SEQ ID NO: 32668 - DNA, 20 bp, Artificial Sequence
  Description of Artificial Sequence: Synthetic oligonucleotide
  Target: COL7A1; (+) strand; PAM type: YTN; PAM sequence: CTC
ccctgggatccacagggaga

SEQ ID NO: 32669 - DNA, 20 bp, Artificial Sequence
  Description of Artificial Sequence: Synthetic oligonucleotide
  Target: COL7A1; (+) strand; PAM type: YTN; PAM sequence: CTG
ggatccacagggagatatgg

SEQ ID NO: 32670 - DNA, 20 bp, Artificial Sequence
  Description of Artificial Sequence: Synthetic oligonucleotide
  Target: COL7A1; (+) strand; PAM type: YTN; PAM sequence: CTG
gctggactcctccacagccc

SEQ ID NO: 32671 - DNA, 20 bp, Artificial Sequence
  Description of Artificial Sequence: Synthetic oligonucleotide
  Target: COL7A1; (+) strand; PAM type: YTN; PAM sequence: CTG
gactcctccacagcccgagg

SEQ ID NO: 32672 - DNA, 20 bp, Artificial Sequence
  Description of Artificial Sequence: Synthetic oligonucleotide
  Target: COL7A1; (+) strand; PAM type: YTN; PAM sequence: CTC
ctccacagcccgaggactct

SEQ ID NO: 32673 - DNA, 20 bp, Artificial Sequence
  Description of Artificial Sequence: Synthetic oligonucleotide
  Target: COL7A1; (+) strand; PAM type: YTN; PAM sequence: CTC
cacagcccgaggactctggt

SEQ ID NO: 32674 - DNA, 20 bp, Artificial Sequence
  Description of Artificial Sequence: Synthetic oligonucleotide
  Target: COL7A1; (+) strand; PAM type: YTN; PAM sequence: CTC
tggtgtggccagagctggag

SEQ ID NO: 32675 - DNA, 20 bp, Artificial Sequence
  Description of Artificial Sequence: Synthetic oligonucleotide
  Target: COL7A1; (+) strand; PAM type: YTN; PAM sequence: CTG
gtgtggccagagctggaggc

SEQ ID NO: 32676 - DNA, 20 bp, Artificial Sequence
  Description of Artificial Sequence: Synthetic oligonucleotide
  Target: COL7A1; (+) strand; PAM type: YTN; PAM sequence: CTG
gaggcagtgaagaccatcca

SEQ ID NO: 32677 - DNA, 20 bp, Artificial Sequence
  Description of Artificial Sequence: Synthetic oligonucleotide
  Target: COL7A1; (+) strand; PAM type: YTN; PAM sequence: CTG
cctgctttcctattgcccaa

SEQ ID NO: 32678 - DNA, 20 bp, Artificial Sequence
  Description of Artificial Sequence: Synthetic oligonucleotide
  Target: COL7A1; (+) strand; PAM type: YTN; PAM sequence: CTG
ctttcctattgcccaaggaa

SEQ ID NO: 32679 - DNA, 20 bp, Artificial Sequence
  Description of Artificial Sequence: Synthetic oligonucleotide
  Target: COL7A1; (+) strand; PAM type: YTN; PAM sequence: CTT
tcctattgcccaaggaaggc

SEQ ID NO: 32680 - DNA, 20 bp, Artificial Sequence
  Description of Artificial Sequence: Synthetic oligonucleotide
  Target: COL7A1; (+) strand; PAM type: YTN; PAM sequence: TTT
cctattgcccaaggaaggct

SEQ ID NO: 32681 - DNA, 20 bp, Artificial Sequence
  Description of Artificial Sequence: Synthetic oligonucleotide
  Target: COL7A1; (+) strand; PAM type: YTN; PAM sequence: TTC
ctattgcccaaggaaggctg

SEQ ID NO: 32682 - DNA, 20 bp, Artificial Sequence
  Description of Artificial Sequence: Synthetic oligonucleotide
  Target: COL7A1; (+) strand; PAM type: YTN; PAM sequence: CTA
ttgcccaaggaaggctgggg

SEQ ID NO: 32683 - DNA, 20 bp, Artificial Sequence
  Description of Artificial Sequence: Synthetic oligonucleotide
  Target: COL7A1; (+) strand; PAM type: YTN; PAM sequence: TTG
cccaaggaaggctggggctc

SEQ ID NO: 32684 - DNA, 20 bp, Artificial Sequence
  Description of Artificial Sequence: Synthetic oligonucleotide
  Target: COL7A1; (+) strand; PAM type: YTN; PAM sequence: CTG
gggctctatcccttattact

SEQ ID NO: 32685 - DNA, 20 bp, Artificial Sequence
  Description of Artificial Sequence: Synthetic oligonucleotide
  Target: COL7A1; (+) strand; PAM type: YTN; PAM sequence: CTC
tatcccttattactgacccc

SEQ ID NO: 32686 - DNA, 20 bp, Artificial Sequence
  Description of Artificial Sequence: Synthetic oligonucleotide
  Target: COL7A1; (+) strand; PAM type: YTN; PAM sequence: CTA
tcccttattactgacccccc

SEQ ID NO: 32687 - DNA, 20 bp, Artificial Sequence
  Description of Artificial Sequence: Synthetic oligonucleotide
  Target: COL7A1; (+) strand; PAM type: YTN; PAM sequence: CTT
attactgaccccccaaacta

SEQ ID NO: 32688 - DNA, 20 bp, Artificial Sequence
  Description of Artificial Sequence: Synthetic oligonucleotide
  Target: COL7A1; (+) strand; PAM type: YTN; PAM sequence: TTA
ttactgaccccccaaactat

SEQ ID NO: 32689 - DNA, 20 bp, Artificial Sequence
  Description of Artificial Sequence: Synthetic oligonucleotide
  Target: COL7A1; (+) strand; PAM type: YTN; PAM sequence: TTA
ctgaccccccaaactatcct

SEQ ID NO: 32690 - DNA, 20 bp, Artificial Sequence
  Description of Artificial Sequence: Synthetic oligonucleotide
  Target: COL7A1; (+) strand; PAM type: YTN; PAM sequence: CTG
accccccaaactatcctggg

SEQ ID NO: 32691 - DNA, 20 bp, Artificial Sequence
  Description of Artificial Sequence: Synthetic oligonucleotide
  Target: COL7A1; (+) strand; PAM type: YTN; PAM sequence: CTA
tcctggggcatagtgctatg

SEQ ID NO: 32692 - DNA, 20 bp, Artificial Sequence
  Description of Artificial Sequence: Synthetic oligonucleotide
  Target: COL7A1; (+) strand; PAM type: YTN; PAM sequence: CTG
gggcatagtgctatgacctt

SEQ ID NO: 32693 - DNA, 20 bp, Artificial Sequence
  Description of Artificial Sequence: Synthetic oligonucleotide
  Target: COL7A1; (+) strand; PAM type: YTN; PAM sequence: CTA
tgaccttattccaaggtcag

SEQ ID NO: 32694 - DNA, 20 bp, Artificial Sequence
  Description of Artificial Sequence: Synthetic oligonucleotide
  Target: COL7A1; (+) strand; PAM type: YTN; PAM sequence: CTT
attccaaggtcagggtctcc

SEQ ID NO: 32695 - DNA, 20 bp, Artificial Sequence
  Description of Artificial Sequence: Synthetic oligonucleotide
  Target: COL7A1; (+) strand; PAM type: YTN; PAM sequence: TTA
ttccaaggtcagggtctcct

SEQ ID NO: 32696 - DNA, 20 bp, Artificial Sequence
  Description of Artificial Sequence: Synthetic oligonucleotide
  Target: COL7A1; (+) strand; PAM type: YTN; PAM sequence: TTC
caaggtcagggtctcctcag

SEQ ID NO: 32697 - DNA, 20 bp, Artificial Sequence
  Description of Artificial Sequence: Synthetic oligonucleotide
  Target: COL7A1; (+) strand; PAM type: YTN; PAM sequence: CTC
ctcagccatgtcccaggacc

SEQ ID NO: 32698 - DNA, 20 bp, Artificial Sequence
  Description of Artificial Sequence: Synthetic oligonucleotide
  Target: COL7A1; (+) strand; PAM type: YTN; PAM sequence: CTC
agccatgtcccaggaccccc

SEQ ID NO: 32699 - DNA, 20 bp, Artificial Sequence
  Description of Artificial Sequence: Synthetic oligonucleotide
  Target: COL7A1; (+) strand; PAM type: YTN; PAM sequence: CTG
caaggtgtgctccaggtggg

SEQ ID NO: 32700 - DNA, 20 bp, Artificial Sequence
  Description of Artificial Sequence: Synthetic oligonucleotide
  Target: COL7A1; (+) strand; PAM type: YTN; PAM sequence: CTC
caggtggggggctgcagaga

SEQ ID NO: 32701 - DNA, 20 bp, Artificial Sequence
  Description of Artificial Sequence: Synthetic oligonucleotide
  Target: COL7A1; (+) strand; PAM type: YTN; PAM sequence: CTG
cagagaaccaggtatgttat

SEQ ID NO: 32702 - DNA, 20 bp, Artificial Sequence
  Description of Artificial Sequence: Synthetic oligonucleotide
  Target: COL7A1; (+) strand; PAM type: YTN; PAM sequence: TTA
tcacacaggcagccccttcc

SEQ ID NO: 32703 - DNA, 20 bp, Artificial Sequence
  Description of Artificial Sequence: Synthetic oligonucleotide
  Target: COL7A1; (+) strand; PAM type: YTN; PAM sequence: CTT
ccccctaagactgtcacctc

SEQ ID NO: 32704 - DNA, 20 bp, Artificial Sequence
  Description of Artificial Sequence: Synthetic oligonucleotide
  Target: COL7A1; (+) strand; PAM type: YTN; PAM sequence: TTC
cccctaagactgtcacctcc

SEQ ID NO: 32705 - DNA, 20 bp, Artificial Sequence
  Description of Artificial Sequence: Synthetic oligonucleotide
  Target: COL7A1; (+) strand; PAM type: YTN; PAM sequence: CTA
agactgtcacctcctcccgt

SEQ ID NO: 32706 - DNA, 20 bp, Artificial Sequence
  Description of Artificial Sequence: Synthetic oligonucleotide
  Target: COL7A1; (+) strand; PAM type: YTN; PAM sequence: CTG
tcacctcctcccgtgcagcc

SEQ ID NO: 32707 - DNA, 20 bp, Artificial Sequence
  Description of Artificial Sequence: Synthetic oligonucleotide
  Target: COL7A1; (+) strand; PAM type: YTN; PAM sequence: CTC
ctcccgtgcagccagggcgg

SEQ ID NO: 32708 - DNA, 20 bp, Artificial Sequence
  Description of Artificial Sequence: Synthetic oligonucleotide
  Target: COL7A1; (+) strand; PAM type: YTN; PAM sequence: CTC
ccgtgcagccagggcgggca

SEQ ID NO: 32709 - DNA, 20 bp, Artificial Sequence
  Description of Artificial Sequence: Synthetic oligonucleotide
  Target: COL7A1; (+) strand; PAM type: YTN; PAM sequence: CTT
aggggagacaggaggcccag

SEQ ID NO: 32710 - DNA, 20 bp, Artificial Sequence
  Description of Artificial Sequence: Synthetic oligonucleotide
  Target: COL7A1; (+) strand; PAM type: YTN; PAM sequence: TTA
ggggagacaggaggcccagc

SEQ ID NO: 32711 - DNA, 20 bp, Artificial Sequence
  Description of Artificial Sequence: Synthetic oligonucleotide
  Target: COL7A1; (+) strand; PAM type: YTN; PAM sequence: CTG
ggagggtgggtgctcaggca

SEQ ID NO: 32712 - DNA, 20 bp, Artificial Sequence
  Description of Artificial Sequence: Synthetic oligonucleotide
  Target: COL7A1; (+) strand; PAM type: YTN; PAM sequence: CTC
aggcaaacctcatcagaatt

SEQ ID NO: 32713 - DNA, 20 bp, Artificial Sequence
  Description of Artificial Sequence: Synthetic oligonucleotide
  Target: COL7A1; (+) strand; PAM type: YTN; PAM sequence: CTC
atcagaattgaggtgcctcc

SEQ ID NO: 32714 - DNA, 20 bp, Artificial Sequence
  Description of Artificial Sequence: Synthetic oligonucleotide
  Target: COL7A1; (+) strand; PAM type: YTN; PAM sequence: TTG
aggtgcctccaaaagaaagg

SEQ ID NO: 32715 - DNA, 20 bp, Artificial Sequence
  Description of Artificial Sequence: Synthetic oligonucleotide
  Target: COL7A1; (+) strand; PAM type: YTN; PAM sequence: CTC
caaaagaaaggacaggctgc

SEQ ID NO: 32716 - DNA, 20 bp, Artificial Sequence
  Description of Artificial Sequence: Synthetic oligonucleotide
  Target: COL7A1; (+) strand; PAM type: YTN; PAM sequence: CTG
ctgtgagagggtctctcaaa

SEQ ID NO: 32717 - DNA, 20 bp, Artificial Sequence
  Description of Artificial Sequence: Synthetic oligonucleotide
  Target: COL7A1; (+) strand; PAM type: YTN; PAM sequence: CTG
tgagagggtctctcaaaggg

SEQ ID NO: 32718 - DNA, 20 bp, Artificial Sequence
  Description of Artificial Sequence: Synthetic oligonucleotide
  Target: COL7A1; (+) strand; PAM type: YTN; PAM sequence: CTC
tcaaagggtgctgggagagg

SEQ ID NO: 32719 - DNA, 20 bp, Artificial Sequence
  Description of Artificial Sequence: Synthetic oligonucleotide
  Target: COL7A1; (+) strand; PAM type: YTN; PAM sequence: CTC
aaagggtgctgggagaggct

SEQ ID NO: 32720 - DNA, 20 bp, Artificial Sequence
  Description of Artificial Sequence: Synthetic oligonucleotide
  Target: COL7A1; (+) strand; PAM type: YTN; PAM sequence: CTG
ggagaggctgttgagaaggt

SEQ ID NO: 32721 - DNA, 20 bp, Artificial Sequence
  Description of Artificial Sequence: Synthetic oligonucleotide
  Target: COL7A1; (+) strand; PAM type: YTN; PAM sequence: CTG
ttgagaaggtaggagtaagg

SEQ ID NO: 32722 - DNA, 20 bp, Artificial Sequence
  Description of Artificial Sequence: Synthetic oligonucleotide
  Target: COL7A1; (+) strand; PAM type: YTN; PAM sequence: TTG
agaaggtaggagtaaggttg

SEQ ID NO: 32723 - DNA, 20 bp, Artificial Sequence
  Description of Artificial Sequence: Synthetic oligonucleotide
  Target: COL7A1; (+) strand; PAM type: YTN; PAM sequence: TTG
gaatgactccacgtctggag

SEQ ID NO: 32724 - DNA, 20 bp, Artificial Sequence
  Description of Artificial Sequence: Synthetic oligonucleotide
  Target: COL7A1; (+) strand; PAM type: YTN; PAM sequence: CTC
cacgtctggagcttctatga

SEQ ID NO: 32725 - DNA, 20 bp, Artificial Sequence
  Description of Artificial Sequence: Synthetic oligonucleotide
  Target: COL7A1; (+) strand; PAM type: YTN; PAM sequence: CTG
gagcttctatgagactcacg

SEQ ID NO: 32726 - DNA, 20 bp, Artificial Sequence
  Description of Artificial Sequence: Synthetic oligonucleotide
  Target: COL7A1; (+) strand; PAM type: YTN; PAM sequence: CTT
ctatgagactcacgagcagg

SEQ ID NO: 32727 - DNA, 20 bp, Artificial Sequence
  Description of Artificial Sequence: Synthetic oligonucleotide
  Target: COL7A1; (+) strand; PAM type: YTN; PAM sequence: TTC
tatgagactcacgagcagga

SEQ ID NO: 32728 - DNA, 20 bp, Artificial Sequence
  Description of Artificial Sequence: Synthetic oligonucleotide
  Target: COL7A1; (+) strand; PAM type: YTN; PAM sequence: CTA
tgagactcacgagcaggagt

SEQ ID NO: 32729 - DNA, 20 bp, Artificial Sequence
  Description of Artificial Sequence: Synthetic oligonucleotide
  Target: COL7A1; (+) strand; PAM type: YTN; PAM sequence: CTC
acgagcaggagtgtggccct

SEQ ID NO: 32730 - DNA, 20 bp, Artificial Sequence
  Description of Artificial Sequence: Synthetic oligonucleotide
  Target: COL7A1; (+) strand; PAM type: YTN; PAM sequence: CTC
tgaagccccagctctggcct

SEQ ID NO: 32731 - DNA, 20 bp, Artificial Sequence
  Description of Artificial Sequence: Synthetic oligonucleotide
  Target: COL7A1; (+) strand; PAM type: YTN; PAM sequence: CTG
aagccccagctctggcctcc

SEQ ID NO: 32732 - DNA, 20 bp, Artificial Sequence
  Description of Artificial Sequence: Synthetic oligonucleotide
  Target: COL7A1; (+) strand; PAM type: YTN; PAM sequence: CTC
tggcctcctgggaggaacac

SEQ ID NO: 32733 - DNA, 20 bp, Artificial Sequence
  Description of Artificial Sequence: Synthetic oligonucleotide
  Target: COL7A1; (+) strand; PAM type: YTN; PAM sequence: CTG
gcctcctgggaggaacacag

SEQ ID NO: 32734 - DNA, 20 bp, Artificial Sequence
  Description of Artificial Sequence: Synthetic oligonucleotide
  Target: COL7A1; (+) strand; PAM type: YTN; PAM sequence: CTC
ctgggaggaacacagcctag

SEQ ID NO: 32735 - DNA, 20 bp, Artificial Sequence
  Description of Artificial Sequence: Synthetic oligonucleotide
  Target: COL7A1; (+) strand; PAM type: YTN; PAM sequence: CTG
ggaggaacacagcctagggc

SEQ ID NO: 32736 - DNA, 20 bp, Artificial Sequence
  Description of Artificial Sequence: Synthetic oligonucleotide
  Target: COL7A1; (+) strand; PAM type: YTN; PAM sequence: CTA
gggcacagcccgaggccagt

SEQ ID NO: 32737 - DNA, 20 bp, Artificial Sequence
  Description of Artificial Sequence: Synthetic oligonucleotide
  Target: COL7A1; (+) strand; PAM type: YTN; PAM sequence: CTA
cctgcaaccccatcagggcg

SEQ ID NO: 32738 - DNA, 20 bp, Artificial Sequence
  Description of Artificial Sequence: Synthetic oligonucleotide
  Target: COL7A1; (+) strand; PAM type: YTN; PAM sequence: CTG
caaccccatcagggcggtgg

SEQ ID NO: 32739 - DNA, 20 bp, Artificial Sequence
  Description of Artificial Sequence: Synthetic oligonucleotide
  Target: COL7A1; (+) strand; PAM type: YTN; PAM sequence: CTT
ctccctcccaagctttccct

SEQ ID NO: 32740 - DNA, 20 bp, Artificial Sequence
  Description of Artificial Sequence: Synthetic oligonucleotide
  Target: COL7A1; (+) strand; PAM type: YTN; PAM sequence: TTC
tccctcccaagctttccctg

SEQ ID NO: 32741 - DNA, 20 bp, Artificial Sequence
  Description of Artificial Sequence: Synthetic oligonucleotide
  Target: COL7A1; (+) strand; PAM type: YTN; PAM sequence: CTC
cctcccaagctttccctgaa

SEQ ID NO: 32742 - DNA, 20 bp, Artificial Sequence
  Description of Artificial Sequence: Synthetic oligonucleotide
  Target: COL7A1; (+) strand; PAM type: YTN; PAM sequence: CTC
ccaagctttccctgaacatt

SEQ ID NO: 32743 - DNA, 20 bp, Artificial Sequence
  Description of Artificial Sequence: Synthetic oligonucleotide
  Target: COL7A1; (+) strand; PAM type: YTN; PAM sequence: CTT
tccctgaacatttccttccc

SEQ ID NO: 32744 - DNA, 20 bp, Artificial Sequence
  Description of Artificial Sequence: Synthetic oligonucleotide
  Target: COL7A1; (+) strand; PAM type: YTN; PAM sequence: TTT
ccctgaacatttccttccct

SEQ ID NO: 32745 - DNA, 20 bp, Artificial Sequence
  Description of Artificial Sequence: Synthetic oligonucleotide
  Target: COL7A1; (+) strand; PAM type: YTN; PAM sequence: TTC
cctgaacatttccttccctg

SEQ ID NO: 32746 - DNA, 20 bp, Artificial Sequence
  Description of Artificial Sequence: Synthetic oligonucleotide
  Target: COL7A1; (+) strand; PAM type: YTN; PAM sequence: CTG
aacatttccttccctggcct

SEQ ID NO: 32747 - DNA, 20 bp, Artificial Sequence
  Description of Artificial Sequence: Synthetic oligonucleotide
  Target: COL7A1; (+) strand; PAM type: YTN; PAM sequence: TTT
ccttccctggcctcagtcac

SEQ ID NO: 32748 - DNA, 20 bp, Artificial Sequence
  Description of Artificial Sequence: Synthetic oligonucleotide
  Target: COL7A1; (+) strand; PAM type: YTN; PAM sequence: TTC
cttccctggcctcagtcact

SEQ ID NO: 32749 - DNA, 20 bp, Artificial Sequence
  Description of Artificial Sequence: Synthetic oligonucleotide
  Target: COL7A1; (+) strand; PAM type: YTN; PAM sequence: CTT
ccctggcctcagtcactacc

SEQ ID NO: 32750 - DNA, 20 bp, Artificial Sequence
  Description of Artificial Sequence: Synthetic oligonucleotide
  Target: COL7A1; (+) strand; PAM type: YTN; PAM sequence: TTC
cctggcctcagtcactacct

SEQ ID NO: 32751 - DNA, 20 bp, Artificial Sequence
  Description of Artificial Sequence: Synthetic oligonucleotide
  Target: COL7A1; (+) strand; PAM type: YTN; PAM sequence: CTG
gcctcagtcactacctcacc

SEQ ID NO: 32752 - DNA, 20 bp, Artificial Sequence
  Description of Artificial Sequence: Synthetic oligonucleotide
  Target: COL7A1; (+) strand; PAM type: YTN; PAM sequence: CTC
agtcactacctcaccccatc

SEQ ID NO: 32753 - DNA, 20 bp, Artificial Sequence
  Description of Artificial Sequence: Synthetic oligonucleotide
  Target: COL7A1; (+) strand; PAM type: YTN; PAM sequence: CTA
cctcaccccatctgtttcca

SEQ ID NO: 32754 - DNA, 20 bp, Artificial Sequence
  Description of Artificial Sequence: Synthetic oligonucleotide
  Target: COL7A1; (+) strand; PAM type: YTN; PAM sequence: CTC
accccatctgtttccaacca

SEQ ID NO: 32755 - DNA, 20 bp, Artificial Sequence
  Description of Artificial Sequence: Synthetic oligonucleotide
  Target: COL7A1; (+) strand; PAM type: YTN; PAM sequence: CTG
tttccaaccagggcctcttt

SEQ ID NO: 32756 - DNA, 20 bp, Artificial Sequence
  Description of Artificial Sequence: Synthetic oligonucleotide
  Target: COL7A1; (+) strand; PAM type: YTN; PAM sequence: TTT
ccaaccagggcctctttatc

SEQ ID NO: 32757 - DNA, 20 bp, Artificial Sequence
  Description of Artificial Sequence: Synthetic oligonucleotide
  Target: COL7A1; (+) strand; PAM type: YTN; PAM sequence: TTC
caaccagggcctctttatca

SEQ ID NO: 32758 - DNA, 20 bp, Artificial Sequence
  Description of Artificial Sequence: Synthetic oligonucleotide
  Target: COL7A1; (+) strand; PAM type: YTN; PAM sequence: CTC
tttatcaggtcccagcccca

SEQ ID NO: 32759 - DNA, 20 bp, Artificial Sequence
  Description of Artificial Sequence: Synthetic oligonucleotide
  Target: COL7A1; (+) strand; PAM type: YTN; PAM sequence: CTT
tatcaggtcccagccccaca

SEQ ID NO: 32760 - DNA, 20 bp, Artificial Sequence
  Description of Artificial Sequence: Synthetic oligonucleotide
  Target: COL7A1; (+) strand; PAM type: YTN; PAM sequence: TTT
atcaggtcccagccccacac

SEQ ID NO: 32761 - DNA, 20 bp, Artificial Sequence
  Description of Artificial Sequence: Synthetic oligonucleotide
  Target: COL7A1; (+) strand; PAM type: YTN; PAM sequence: TTA
tcaggtcccagccccacaca

SEQ ID NO: 32762 - DNA, 20 bp, Artificial Sequence
  Description of Artificial Sequence: Synthetic oligonucleotide
  Target: COL7A1; (+) strand; PAM type: YTN; PAM sequence: CTG
taccctggacaccaccaaac

SEQ ID NO: 32763 - DNA, 20 bp, Artificial Sequence
  Description of Artificial Sequence: Synthetic oligonucleotide
  Target: COL7A1; (+) strand; PAM type: YTN; PAM sequence: CTG
gacaccaccaaactcctcac

SEQ ID NO: 32764 - DNA, 20 bp, Artificial Sequence
  Description of Artificial Sequence: Synthetic oligonucleotide
  Target: COL7A1; (+) strand; PAM type: YTN; PAM sequence: CTC
ctcactggactatggaagat

SEQ ID NO: 32765 - DNA, 20 bp, Artificial Sequence
  Description of Artificial Sequence: Synthetic oligonucleotide
  Target: COL7A1; (+) strand; PAM type: YTN; PAM sequence: CTC
actggactatggaagattac

SEQ ID NO: 32766 - DNA, 20 bp, Artificial Sequence
  Description of Artificial Sequence: Synthetic oligonucleotide
  Target: COL7A1; (+) strand; PAM type: YTN; PAM sequence: CTG
gactatggaagattaccctc

SEQ ID NO: 32767 - DNA, 20 bp, Artificial Sequence
  Description of Artificial Sequence: Synthetic oligonucleotide
  Target: COL7A1; (+) strand; PAM type: YTN; PAM sequence: CTA
tggaagattaccctcctcca

SEQ ID NO: 32768 - DNA, 20 bp, Artificial Sequence
  Description of Artificial Sequence: Synthetic oligonucleotide
  Target: COL7A1; (+) strand; PAM type: YTN; PAM sequence: TTA
ccctcctccaacccactcgt

SEQ ID NO: 32769 - DNA, 20 bp, Artificial Sequence
  Description of Artificial Sequence: Synthetic oligonucleotide
  Target: COL7A1; (+) strand; PAM type: YTN; PAM sequence: CTC
ctccaacccactcgtgcctc

SEQ ID NO: 32770 - DNA, 20 bp, Artificial Sequence
  Description of Artificial Sequence: Synthetic oligonucleotide
  Target: COL7A1; (+) strand; PAM type: YTN; PAM sequence: CTC
caacccactcgtgcctccgc

SEQ ID NO: 32771 - DNA, 20 bp, Artificial Sequence
  Description of Artificial Sequence: Synthetic oligonucleotide
  Target: COL7A1; (+) strand; PAM type: YTN; PAM sequence: CTC
gtgcctccgcgtctcccagc

SEQ ID NO: 32772 - DNA, 20 bp, Artificial Sequence
  Description of Artificial Sequence: Synthetic oligonucleotide
  Target: COL7A1; (+) strand; PAM type: YTN; PAM sequence: CTC
cgcgtctcccagccctgctg

SEQ ID NO: 32773 - DNA, 20 bp, Artificial Sequence
  Description of Artificial Sequence: Synthetic oligonucleotide
  Target: COL7A1; (+) strand; PAM type: YTN; PAM sequence: CTC
ccagccctgctgggaatgta

SEQ ID NO: 32774 - DNA, 20 bp, Artificial Sequence
  Description of Artificial Sequence: Synthetic oligonucleotide
  Target: COL7A1; (+) strand; PAM type: YTN; PAM sequence: CTG
ctgggaatgtagtcctcttt

SEQ ID NO: 32775 - DNA, 20 bp, Artificial Sequence
  Description of Artificial Sequence: Synthetic oligonucleotide
  Target: COL7A1; (+) strand; PAM type: YTN; PAM sequence: CTG
ggaatgtagtcctctttgtg

SEQ ID NO: 32776 - DNA, 20 bp, Artificial Sequence
  Description of Artificial Sequence: Synthetic oligonucleotide
  Target: COL7A1; (+) strand; PAM type: YTN; PAM sequence: CTC
tttgtgtcccctacagctgg

SEQ ID NO: 32777 - DNA, 20 bp, Artificial Sequence
  Description of Artificial Sequence: Synthetic oligonucleotide
  Target: COL7A1; (+) strand; PAM type: YTN; PAM sequence: CTT
tgtgtcccctacagctggct

SEQ ID NO: 32778 - DNA, 20 bp, Artificial Sequence
  Description of Artificial Sequence: Synthetic oligonucleotide
  Target: COL7A1; (+) strand; PAM type: YTN; PAM sequence: TTT
gtgtcccctacagctggctc

SEQ ID NO: 32779 - DNA, 20 bp, Artificial Sequence
  Description of Artificial Sequence: Synthetic oligonucleotide
  Target: COL7A1; (+) strand; PAM type: YTN; PAM sequence: TTG
tgtcccctacagctggctcc

SEQ ID NO: 32780 - DNA, 20 bp, Artificial Sequence
  Description of Artificial Sequence: Synthetic oligonucleotide
  Target: COL7A1; (+) strand; PAM type: YTN; PAM sequence: CTA
cagctggctccagttcgtgt

SEQ ID NO: 32781 - DNA, 20 bp, Artificial Sequence
  Description of Artificial Sequence: Synthetic oligonucleotide
  Target: COL7A1; (+) strand; PAM type: YTN; PAM sequence: CTG
gctccagttcgtgtggccat

SEQ ID NO: 32782 - DNA, 20 bp, Artificial Sequence
  Description of Artificial Sequence: Synthetic oligonucleotide
  Target: COL7A1; (+) strand; PAM type: YTN; PAM sequence: CTC
cagttcgtgtggccatgacc

SEQ ID NO: 32783 - DNA, 20 bp, Artificial Sequence
  Description of Artificial Sequence: Synthetic oligonucleotide
  Target: COL7A1; (+) strand; PAM type: YTN; PAM sequence: TTC
gtgtggccatgacctctgtt

SEQ ID NO: 32784 - DNA, 20 bp, Artificial Sequence
  Description of Artificial Sequence: Synthetic oligonucleotide
  Target: COL7A1; (+) strand; PAM type: YTN; PAM sequence: CTC
tgttctgccacagcacagct

SEQ ID NO: 32785 - DNA, 20 bp, Artificial Sequence
  Description of Artificial Sequence: Synthetic oligonucleotide
  Target: COL7A1; (+) strand; PAM type: YTN; PAM sequence: CTG
ttctgccacagcacagctca

SEQ ID NO: 32786 - DNA, 20 bp, Artificial Sequence
  Description of Artificial Sequence: Synthetic oligonucleotide
  Target: COL7A1; (+) strand; PAM type: YTN; PAM sequence: TTC
tgccacagcacagctcacca

SEQ ID NO: 32787 - DNA, 20 bp, Artificial Sequence
  Description of Artificial Sequence: Synthetic oligonucleotide
  Target: COL7A1; (+) strand; PAM type: YTN; PAM sequence: CTG
ccacagcacagctcaccaag

SEQ ID NO: 32788 - DNA, 20 bp, Artificial Sequence
  Description of Artificial Sequence: Synthetic oligonucleotide
  Target: COL7A1; (+) strand; PAM type: YTN; PAM sequence: CTC
accaagactgatacagaaat

SEQ ID NO: 32789 - DNA, 20 bp, Artificial Sequence
  Description of Artificial Sequence: Synthetic oligonucleotide
  Target: COL7A1; (+) strand; PAM type: YTN; PAM sequence: CTG
atacagaaatatggcctgag

SEQ ID NO: 32790 - DNA, 20 bp, Artificial Sequence
  Description of Artificial Sequence: Synthetic oligonucleotide
  Target: COL7A1; (+) strand; PAM type: YTN; PAM sequence: CTG
agagtccccatgctgaatct

SEQ ID NO: 32791 - DNA, 20 bp, Artificial Sequence
  Description of Artificial Sequence: Synthetic oligonucleotide
  Target: COL7A1; (+) strand; PAM type: YTN; PAM sequence: CTG
aatctcaactctgaccaagt

SEQ ID NO: 32792 - DNA, 20 bp, Artificial Sequence
  Description of Artificial Sequence: Synthetic oligonucleotide
  Target: COL7A1; (+) strand; PAM type: YTN; PAM sequence: CTC
aactctgaccaagtcacttc

SEQ ID NO: 32793 - DNA, 20 bp, Artificial Sequence
  Description of Artificial Sequence: Synthetic oligonucleotide
  Target: COL7A1; (+) strand; PAM type: YTN; PAM sequence: CTC
tgaccaagtcacttctcttc

SEQ ID NO: 32794 - DNA, 20 bp, Artificial Sequence
  Description of Artificial Sequence: Synthetic oligonucleotide
  Target: COL7A1; (+) strand; PAM type: YTN; PAM sequence: CTG
accaagtcacttctcttcac

SEQ ID NO: 32795 - DNA, 20 bp, Artificial Sequence
  Description of Artificial Sequence: Synthetic oligonucleotide
  Target: COL7A1; (+) strand; PAM type: YTN; PAM sequence: CTT
ctcttcacagtaacctccaa

SEQ ID NO: 32796 - DNA, 20 bp, Artificial Sequence
  Description of Artificial Sequence: Synthetic oligonucleotide
  Target: COL7A1; (+) strand; PAM type: YTN; PAM sequence: TTC
tcttcacagtaacctccaac

SEQ ID NO: 32797 - DNA, 20 bp, Artificial Sequence
  Description of Artificial Sequence: Synthetic oligonucleotide
  Target: COL7A1; (+) strand; PAM type: YTN; PAM sequence: CTC
ttcacagtaacctccaacac

SEQ ID NO: 32798 - DNA, 20 bp, Artificial Sequence
  Description of Artificial Sequence: Synthetic oligonucleotide
  Target: COL7A1; (+) strand; PAM type: YTN; PAM sequence: CTT
cacagtaacctccaacacac

SEQ ID NO: 32799 - DNA, 20 bp, Artificial Sequence
  Description of Artificial Sequence: Synthetic oligonucleotide
  Target: COL7A1; (+) strand; PAM type: YTN; PAM sequence: TTC
acagtaacctccaacacacc

SEQ ID NO: 32800 - DNA, 20 bp, Artificial Sequence
  Description of Artificial Sequence: Synthetic oligonucleotide
  Target: COL7A1; (+) strand; PAM type: YTN; PAM sequence: CTC
caacacacctccccagcatg

SEQ ID NO: 32801 - DNA, 20 bp, Artificial Sequence
  Description of Artificial Sequence: Synthetic oligonucleotide
  Target: COL7A1; (+) strand; PAM type: YTN; PAM sequence: CTC
cccagcatggctccagggta

SEQ ID NO: 32802 - DNA, 20 bp, Artificial Sequence
  Description of Artificial Sequence: Synthetic oligonucleotide
  Target: COL7A1; (+) strand; PAM type: YTN; PAM sequence: CTC
cagggtaaagaccagagtcc

SEQ ID NO: 32803 - DNA, 20 bp, Artificial Sequence
  Description of Artificial Sequence: Synthetic oligonucleotide
  Target: COL7A1; (+) strand; PAM type: YTN; PAM sequence: CTG
gcttggtacgcaaggtccct

SEQ ID NO: 32804 - DNA, 20 bp, Artificial Sequence
  Description of Artificial Sequence: Synthetic oligonucleotide
  Target: COL7A1; (+) strand; PAM type: YTN; PAM sequence: CTT
ggtacgcaaggtcccttaga

SEQ ID NO: 32805 - DNA, 20 bp, Artificial Sequence
  Description of Artificial Sequence: Synthetic oligonucleotide
  Target: COL7A1; (+) strand; PAM type: YTN; PAM sequence: TTG
gtacgcaaggtcccttagaa

SEQ ID NO: 32806 - DNA, 20 bp, Artificial Sequence
  Description of Artificial Sequence: Synthetic oligonucleotide
  Target: COL7A1; (+) strand; PAM type: YTN; PAM sequence: CTT
agaaccagaccactcccagc

SEQ ID NO: 32807 - DNA, 20 bp, Artificial Sequence
  Description of Artificial Sequence: Synthetic oligonucleotide
  Target: COL7A1; (+) strand; PAM type: YTN; PAM sequence: TTA
gaaccagaccactcccagca

SEQ ID NO: 32808 - DNA, 20 bp, Artificial Sequence
  Description of Artificial Sequence: Synthetic oligonucleotide
  Target: COL7A1; (+) strand; PAM type: YTN; PAM sequence: CTC
ccagcaactcaagctctcgt

SEQ ID NO: 32809 - DNA, 20 bp, Artificial Sequence
  Description of Artificial Sequence: Synthetic oligonucleotide
  Target: COL7A1; (+) strand; PAM type: YTN; PAM sequence: CTC
aagctctcgtgtccagcaca

SEQ ID NO: 32810 - DNA, 20 bp, Artificial Sequence
  Description of Artificial Sequence: Synthetic oligonucleotide
  Target: COL7A1; (+) strand; PAM type: YTN; PAM sequence: CTC
tcgtgtccagcacacctgta

SEQ ID NO: 32811 - DNA, 20 bp, Artificial Sequence
  Description of Artificial Sequence: Synthetic oligonucleotide
  Target: COL7A1; (+) strand; PAM type: YTN; PAM sequence: CTC
gtgtccagcacacctgtagc

SEQ ID NO: 32812 - DNA, 20 bp, Artificial Sequence
  Description of Artificial Sequence: Synthetic oligonucleotide
  Target: COL7A1; (+) strand; PAM type: YTN; PAM sequence: CTG
tagcctctaagggccaggct

SEQ ID NO: 32813 - DNA, 20 bp, Artificial Sequence
  Description of Artificial Sequence: Synthetic oligonucleotide
  Target: COL7A1; (+) strand; PAM type: YTN; PAM sequence: CTC
taagggccaggctgggctta

SEQ ID NO: 32814 - DNA, 20 bp, Artificial Sequence
  Description of Artificial Sequence: Synthetic oligonucleotide
  Target: COL7A1; (+) strand; PAM type: YTN; PAM sequence: CTA
agggccaggctgggcttaga

SEQ ID NO: 32815 - DNA, 20 bp, Artificial Sequence
  Description of Artificial Sequence: Synthetic oligonucleotide
  Target: COL7A1; (+) strand; PAM type: YTN; PAM sequence: CTG
ggcttagaaatgaagcccca

SEQ ID NO: 32816 - DNA, 20 bp, Artificial Sequence
  Description of Artificial Sequence: Synthetic oligonucleotide
  Target: COL7A1; (+) strand; PAM type: YTN; PAM sequence: CTT
agaaatgaagccccatcctc

SEQ ID NO: 32817 - DNA, 20 bp, Artificial Sequence
  Description of Artificial Sequence: Synthetic oligonucleotide
  Target: COL7A1; (+) strand; PAM type: YTN; PAM sequence: TTA
gaaatgaagccccatcctcc

SEQ ID NO: 32818 - DNA, 20 bp, Artificial Sequence
  Description of Artificial Sequence: Synthetic oligonucleotide
  Target: COL7A1; (+) strand; PAM type: YTN; PAM sequence: CTC
caggagctcaaacttgacaa

SEQ ID NO: 32819 - DNA, 20 bp, Artificial Sequence
  Description of Artificial Sequence: Synthetic oligonucleotide
  Target: COL7A1; (+) strand; PAM type: YTN; PAM sequence: CTC
aaacttgacaacagacttgg

SEQ ID NO: 32820 - DNA, 20 bp, Artificial Sequence
  Description of Artificial Sequence: Synthetic oligonucleotide
  Target: COL7A1; (+) strand; PAM type: YTN; PAM sequence: CTT
gacaacagacttggcacttg

SEQ ID NO: 32821 - DNA, 20 bp, Artificial Sequence
  Description of Artificial Sequence: Synthetic oligonucleotide
  Target: COL7A1; (+) strand; PAM type: YTN; PAM sequence: TTG
acaacagacttggcacttgt

SEQ ID NO: 32822 - DNA, 20 bp, Artificial Sequence
  Description of Artificial Sequence: Synthetic oligonucleotide
  Target: COL7A1; (+) strand; PAM type: YTN; PAM sequence: CTT
ggcacttgttcccctgcctg

SEQ ID NO: 32823 - DNA, 20 bp, Artificial Sequence
  Description of Artificial Sequence: Synthetic oligonucleotide
  Target: COL7A1; (+) strand; PAM type: YTN; PAM sequence: TTG
gcacttgttcccctgcctgg

SEQ ID NO: 32824 - DNA, 20 bp, Artificial Sequence
  Description of Artificial Sequence: Synthetic oligonucleotide
  Target: COL7A1; (+) strand; PAM type: YTN; PAM sequence: CTT
gttcccctgcctgggtgttg

SEQ ID NO: 32825 - DNA, 20 bp, Artificial Sequence
  Description of Artificial Sequence: Synthetic oligonucleotide
  Target: COL7A1; (+) strand; PAM type: YTN; PAM sequence: TTG
ttcccctgcctgggtgttgc

SEQ ID NO: 32826 - DNA, 20 bp, Artificial Sequence
  Description of Artificial Sequence: Synthetic oligonucleotide
  Target: COL7A1; (+) strand; PAM type: YTN; PAM sequence: TTC
ccctgcctgggtgttgcacc

SEQ ID NO: 32827 - DNA, 20 bp, Artificial Sequence
  Description of Artificial Sequence: Synthetic oligonucleotide
  Target: COL7A1; (+) strand; PAM type: YTN; PAM sequence: CTG
cctgggtgttgcacctccat

SEQ ID NO: 32828 - DNA, 20 bp, Artificial Sequence
  Description of Artificial Sequence: Synthetic oligonucleotide
  Target: COL7A1; (+) strand; PAM type: YTN; PAM sequence: CTG
ggtgttgcacctccatgagc

SEQ ID NO: 32829 - DNA, 20 bp, Artificial Sequence
  Description of Artificial Sequence: Synthetic oligonucleotide
  Target: COL7A1; (+) strand; PAM type: YTN; PAM sequence: TTG
cacctccatgagcacccagg

SEQ ID NO: 32830 - DNA, 20 bp, Artificial Sequence
  Description of Artificial Sequence: Synthetic oligonucleotide
  Target: COL7A1; (+) strand; PAM type: YTN; PAM sequence: CTC
catgagcacccagggttggg

SEQ ID NO: 32831 - DNA, 20 bp, Artificial Sequence
  Description of Artificial Sequence: Synthetic oligonucleotide
  Target: COL7A1; (+) strand; PAM type: YTN; PAM sequence: TTG
ggcctgtcagggttctgcgc

SEQ ID NO: 32832 - DNA, 20 bp, Artificial Sequence
  Description of Artificial Sequence: Synthetic oligonucleotide
  Target: COL7A1; (+) strand; PAM type: YTN; PAM sequence: CTG
tcagggttctgcgctgccca

SEQ ID NO: 32833 - DNA, 20 bp, Artificial Sequence
  Description of Artificial Sequence: Synthetic oligonucleotide
  Target: COL7A1; (+) strand; PAM type: YTN; PAM sequence: TTC
tgcgctgcccagcatcttct

SEQ ID NO: 32834 - DNA, 20 bp, Artificial Sequence
  Description of Artificial Sequence: Synthetic oligonucleotide
  Target: COL7A1; (+) strand; PAM type: YTN; PAM sequence: CTG
cgctgcccagcatcttctct

SEQ ID NO: 32835 - DNA, 20 bp, Artificial Sequence
  Description of Artificial Sequence: Synthetic oligonucleotide
  Target: COL7A1; (+) strand; PAM type: YTN; PAM sequence: CTG
cccagcatcttctctccagc

SEQ ID NO: 32836 - DNA, 20 bp, Artificial Sequence
  Description of Artificial Sequence: Synthetic oligonucleotide
  Target: COL7A1; (+) strand; PAM type: YTN; PAM sequence: CTT
ctctccagccgttcacaaag

SEQ ID NO: 32837 - DNA, 20 bp, Artificial Sequence
  Description of Artificial Sequence: Synthetic oligonucleotide
  Target: COL7A1; (+) strand; PAM type: YTN; PAM sequence: TTC
tctccagccgttcacaaagt

SEQ ID NO: 32838 - DNA, 20 bp, Artificial Sequence
  Description of Artificial Sequence: Synthetic oligonucleotide
  Target: COL7A1; (+) strand; PAM type: YTN; PAM sequence: CTC
tccagccgttcacaaagtag

SEQ ID NO: 32839 - DNA, 20 bp, Artificial Sequence
  Description of Artificial Sequence: Synthetic oligonucleotide
  Target: COL7A1; (+) strand; PAM type: YTN; PAM sequence: CTC
cagccgttcacaaagtagaa

SEQ ID NO: 32840 - DNA, 20 bp, Artificial Sequence
  Description of Artificial Sequence: Synthetic oligonucleotide
  Target: COL7A1; (+) strand; PAM type: YTN; PAM sequence: TTC
acaaagtagaatgatctgcg

SEQ ID NO: 32841 - DNA, 20 bp, Artificial Sequence
  Description of Artificial Sequence: Synthetic oligonucleotide
  Target: COL7A1; (+) strand; PAM type: YTN; PAM sequence: CTG
cgcaatgccccagtcccggg

SEQ ID NO: 32842 - DNA, 20 bp, Artificial Sequence
  Description of Artificial Sequence: Synthetic oligonucleotide
  Target: COL7A1; (+) strand; PAM type: YTN; PAM sequence: CTT
aacaaatgtctccgaattgg

SEQ ID NO: 32843 - DNA, 20 bp, Artificial Sequence
  Description of Artificial Sequence: Synthetic oligonucleotide
  Target: COL7A1; (+) strand; PAM type: YTN; PAM sequence: TTA
acaaatgtctccgaattggc

SEQ ID NO: 32844 - DNA, 20 bp, Artificial Sequence
  Description of Artificial Sequence: Synthetic oligonucleotide
  Target: COL7A1; (+) strand; PAM type: YTN; PAM sequence: CTC
cgaattggcaacgtatggca

SEQ ID NO: 32845 - DNA, 20 bp, Artificial Sequence
  Description of Artificial Sequence: Synthetic oligonucleotide
  Target: COL7A1; (+) strand; PAM type: YTN; PAM sequence: TTG
gcaacgtatggcaaccaatg

SEQ ID NO: 32846 - DNA, 20 bp, Artificial Sequence
  Description of Artificial Sequence: Synthetic oligonucleotide
  Target: COL7A1; (+) strand; PAM type: YTN; PAM sequence: TTC
cttgggctacttccaagcta

SEQ ID NO: 32847 - DNA, 20 bp, Artificial Sequence
  Description of Artificial Sequence: Synthetic oligonucleotide
  Target: COL7A1; (+) strand; PAM type: YTN; PAM sequence: CTT
gggctacttccaagctacga

SEQ ID NO: 32848 - DNA, 20 bp, Artificial Sequence
  Description of Artificial Sequence: Synthetic oligonucleotide
  Target: COL7A1; (+) strand; PAM type: YTN; PAM sequence: TTG
ggctacttccaagctacgat

SEQ ID NO: 32849 - DNA, 20 bp, Artificial Sequence
  Description of Artificial Sequence: Synthetic oligonucleotide
  Target: COL7A1; (+) strand; PAM type: YTN; PAM sequence: CTA
cttccaagctacgatgctgg

SEQ ID NO: 32850 - DNA, 20 bp, Artificial Sequence
  Description of Artificial Sequence: Synthetic oligonucleotide
  Target: COL7A1; (+) strand; PAM type: YTN; PAM sequence: CTT
ccaagctacgatgctggggg

SEQ ID NO: 32851 - DNA, 20 bp, Artificial Sequence
  Description of Artificial Sequence: Synthetic oligonucleotide
  Target: COL7A1; (+) strand; PAM type: YTN; PAM sequence: TTC
caagctacgatgctgggggg

SEQ ID NO: 32852 - DNA, 20 bp, Artificial Sequence
  Description of Artificial Sequence: Synthetic oligonucleotide
  Target: COL7A1; (+) strand; PAM type: YTN; PAM sequence: CTA
cgatgctggggggacttctg

SEQ ID NO: 32853 - DNA, 20 bp, Artificial Sequence
  Description of Artificial Sequence: Synthetic oligonucleotide
  Target: COL7A1; (+) strand; PAM type: YTN; PAM sequence: CTG
gggggacttctgaacagcca

SEQ ID NO: 32854 - DNA, 20 bp, Artificial Sequence
  Description of Artificial Sequence: Synthetic oligonucleotide
  Target: COL7A1; (+) strand; PAM type: YTN; PAM sequence: CTT
ctgaacagccatcttctaaa

SEQ ID NO: 32855 - DNA, 20 bp, Artificial Sequence
  Description of Artificial Sequence: Synthetic oligonucleotide
  Target: COL7A1; (+) strand; PAM type: YTN; PAM sequence: TTC
tgaacagccatcttctaaaa

SEQ ID NO: 32856 - DNA, 20 bp, Artificial Sequence
  Description of Artificial Sequence: Synthetic oligonucleotide
  Target: COL7A1; (+) strand; PAM type: YTN; PAM sequence: CTG
aacagccatcttctaaaaga

SEQ ID NO: 32857 - DNA, 20 bp, Artificial Sequence
  Description of Artificial Sequence: Synthetic oligonucleotide
  Target: COL7A1; (+) strand; PAM type: YTN; PAM sequence: CTT
ctaaaagaccttgtcccagc

SEQ ID NO: 32858 - DNA, 20 bp, Artificial Sequence
  Description of Artificial Sequence: Synthetic oligonucleotide
  Target: COL7A1; (+) strand; PAM type: YTN; PAM sequence: TTC
taaaagaccttgtcccagca

SEQ ID NO: 32859 - DNA, 20 bp, Artificial Sequence
  Description of Artificial Sequence: Synthetic oligonucleotide
  Target: COL7A1; (+) strand; PAM type: YTN; PAM sequence: CTA
aaagaccttgtcccagcacc

SEQ ID NO: 32860 - DNA, 20 bp, Artificial Sequence
  Description of Artificial Sequence: Synthetic oligonucleotide
  Target: COL7A1; (+) strand; PAM type: YTN; PAM sequence: CTT
gtcccagcaccctgcttgtg

SEQ ID NO: 32861 - DNA, 20 bp, Artificial Sequence
  Description of Artificial Sequence: Synthetic oligonucleotide
  Target: COL7A1; (+) strand; PAM type: YTN; PAM sequence: TTG
tcccagcaccctgcttgtga

SEQ ID NO: 32862 - DNA, 20 bp, Artificial Sequence
  Description of Artificial Sequence: Synthetic oligonucleotide
  Target: COL7A1; (+) strand; PAM type: YTN; PAM sequence: CTG
cttgtgactgccaggcagcg

SEQ ID NO: 32863 - DNA, 20 bp, Artificial Sequence
  Description of Artificial Sequence: Synthetic oligonucleotide
  Target: COL7A1; (+) strand; PAM type: YTN; PAM sequence: CTT
gtgactgccaggcagcgact

SEQ ID NO: 32864 - DNA, 20 bp, Artificial Sequence
  Description of Artificial Sequence: Synthetic oligonucleotide
  Target: COL7A1; (+) strand; PAM type: YTN; PAM sequence: TTG
tgactgccaggcagcgactt

SEQ ID NO: 32865 - DNA, 20 bp, Artificial Sequence
  Description of Artificial Sequence: Synthetic oligonucleotide
  Target: COL7A1; (+) strand; PAM type: YTN; PAM sequence: CTG
ccaggcagcgacttcctcaa

SEQ ID NO: 32866 - DNA, 20 bp, Artificial Sequence
  Description of Artificial Sequence: Synthetic oligonucleotide
  Target: COL7A1; (+) strand; PAM type: YTN; PAM sequence: CTT
cctcaaaggaaaattgggcc

SEQ ID NO: 32867 - DNA, 20 bp, Artificial Sequence
  Description of Artificial Sequence: Synthetic oligonucleotide
  Target: COL7A1; (+) strand; PAM type: YTN; PAM sequence: TTC
ctcaaaggaaaattgggccc

SEQ ID NO: 32868 - DNA, 20 bp, Artificial Sequence
  Description of Artificial Sequence: Synthetic oligonucleotide
  Target: COL7A1; (+) strand; PAM type: YTN; PAM sequence: CTC
aaaggaaaattgggcccctc

SEQ ID NO: 32869 - DNA, 20 bp, Artificial Sequence
  Description of Artificial Sequence: Synthetic oligonucleotide
  Target: COL7A1; (+) strand; PAM type: YTN; PAM sequence: TTG
ggcccctcgctttcaacttc

SEQ ID NO: 32870 - DNA, 20 bp, Artificial Sequence
  Description of Artificial Sequence: Synthetic oligonucleotide
  Target: COL7A1; (+) strand; PAM type: YTN; PAM sequence: CTC
gctttcaacttccccctggg

SEQ ID NO: 32871 - DNA, 20 bp, Artificial Sequence
  Description of Artificial Sequence: Synthetic oligonucleotide
  Target: COL7A1; (+) strand; PAM type: YTN; PAM sequence: CTT
tcaacttccccctgggatcc

SEQ ID NO: 32872 - DNA, 20 bp, Artificial Sequence
  Description of Artificial Sequence: Synthetic oligonucleotide
  Target: COL7A1; (+) strand; PAM type: YTN; PAM sequence: TTT
caacttccccctgggatccc

SEQ ID NO: 32873 - DNA, 20 bp, Artificial Sequence
  Description of Artificial Sequence: Synthetic oligonucleotide
  Target: COL7A1; (+) strand; PAM type: YTN; PAM sequence: TTC
aacttccccctgggatccca

SEQ ID NO: 32874 - DNA, 20 bp, Artificial Sequence
  Description of Artificial Sequence: Synthetic oligonucleotide
  Target: COL7A1; (+) strand; PAM type: YTN; PAM sequence: CTT
ccccctgggatcccagagaa

SEQ ID NO: 32875 - DNA, 20 bp, Artificial Sequence
  Description of Artificial Sequence: Synthetic oligonucleotide
  Target: COL7A1; (+) strand; PAM type: YTN; PAM sequence: TTC
cccctgggatcccagagaac

SEQ ID NO: 32876 - DNA, 20 bp, Artificial Sequence
  Description of Artificial Sequence: Synthetic oligonucleotide
  Target: COL7A1; (+) strand; PAM type: YTN; PAM sequence: CTG
ggatcccagagaacctgact

SEQ ID NO: 32877 - DNA, 20 bp, Artificial Sequence
  Description of Artificial Sequence: Synthetic oligonucleotide
  Target: COL7A1; (+) strand; PAM type: YTN; PAM sequence: CTG
actgtggaagcactgggggg

SEQ ID NO: 32878 - DNA, 20 bp, Artificial Sequence
  Description of Artificial Sequence: Synthetic oligonucleotide
  Target: COL7A1; (+) strand; PAM type: YTN; PAM sequence: CTG
tggaagcactggggggtgca

SEQ ID NO: 32879 - DNA, 20 bp, Artificial Sequence
  Description of Artificial Sequence: Synthetic oligonucleotide
  Target: COL7A1; (+) strand; PAM type: YTN; PAM sequence: CTG
gggggtgcaggaggagcagc

SEQ ID NO: 32880 - DNA, 20 bp, Artificial Sequence
  Description of Artificial Sequence: Synthetic oligonucleotide
  Target: COL7A1; (+) strand; PAM type: YTN; PAM sequence: CTA
cctgcgcacccaccatgggg

SEQ ID NO: 32881 - DNA, 20 bp, Artificial Sequence
  Description of Artificial Sequence: Synthetic oligonucleotide
  Target: COL7A1; (+) strand; PAM type: YTN; PAM sequence: CTG
cgcacccaccatggggacca

SEQ ID NO: 32882 - DNA, 20 bp, Artificial Sequence
  Description of Artificial Sequence: Synthetic oligonucleotide
  Target: COL7A1; (+) strand; PAM type: YTN; PAM sequence: CTA
ggtagctaagagctgtacca

SEQ ID NO: 32883 - DNA, 20 bp, Artificial Sequence
  Description of Artificial Sequence: Synthetic oligonucleotide
  Target: COL7A1; (+) strand; PAM type: YTN; PAM sequence: CTA
agagctgtaccaggtcctgg

SEQ ID NO: 32884 - DNA, 20 bp, Artificial Sequence
  Description of Artificial Sequence: Synthetic oligonucleotide
  Target: COL7A1; (+) strand; PAM type: YTN; PAM sequence: CTG
taccaggtcctggctgcctc

SEQ ID NO: 32885 - DNA, 20 bp, Artificial Sequence
  Description of Artificial Sequence: Synthetic oligonucleotide
  Target: COL7A1; (+) strand; PAM type: YTN; PAM sequence: CTG
gctgcctcaggaaaatgggg

SEQ ID NO: 32886 - DNA, 20 bp, Artificial Sequence
  Description of Artificial Sequence: Synthetic oligonucleotide
  Target: COL7A1; (+) strand; PAM type: YTN; PAM sequence: CTG
cctcaggaaaatggggaggg

SEQ ID NO: 32887 - DNA, 20 bp, Artificial Sequence
  Description of Artificial Sequence: Synthetic oligonucleotide
  Target: COL7A1; (+) strand; PAM type: YTN; PAM sequence: CTC
aggaaaatggggaggggatt

SEQ ID NO: 32888 - DNA, 20 bp, Artificial Sequence
  Description of Artificial Sequence: Synthetic oligonucleotide
  Target: COL7A1; (+) strand; PAM type: YTN; PAM sequence: TTG
tcaggccagcagctctggac

SEQ ID NO: 32889 - DNA, 20 bp, Artificial Sequence
  Description of Artificial Sequence: Synthetic oligonucleotide
  Target: COL7A1; (+) strand; PAM type: YTN; PAM sequence: CTC
tggacttgcctgggacaaat

SEQ ID NO: 32890 - DNA, 20 bp, Artificial Sequence
  Description of Artificial Sequence: Synthetic oligonucleotide
  Target: COL7A1; (+) strand; PAM type: YTN; PAM sequence: CTG
gacttgcctgggacaaatgt

SEQ ID NO: 32891 - DNA, 20 bp, Artificial Sequence
  Description of Artificial Sequence: Synthetic oligonucleotide
  Target: COL7A1; (+) strand; PAM type: YTN; PAM sequence: CTT
gcctgggacaaatgtagtag

SEQ ID NO: 32892 - DNA, 20 bp, Artificial Sequence
  Description of Artificial Sequence: Synthetic oligonucleotide
  Target: COL7A1; (+) strand; PAM type: YTN; PAM sequence: TTG
cctgggacaaatgtagtaga

SEQ ID NO: 32893 - DNA, 20 bp, Artificial Sequence
  Description of Artificial Sequence: Synthetic oligonucleotide
  Target: COL7A1; (+) strand; PAM type: YTN; PAM sequence: CTG
ggacaaatgtagtagaggga

SEQ ID NO: 32894 - DNA, 20 bp, Artificial Sequence
  Description of Artificial Sequence: Synthetic oligonucleotide
  Target: COL7A1; (+) strand; PAM type: YTN; PAM sequence: CTC
gggccccactgagctcaggg

SEQ ID NO: 32895 - DNA, 20 bp, Artificial Sequence
  Description of Artificial Sequence: Synthetic oligonucleotide
  Target: COL7A1; (+) strand; PAM type: YTN; PAM sequence: CTG
agctcagggctattcttgga

SEQ ID NO: 32896 - DNA, 20 bp, Artificial Sequence
  Description of Artificial Sequence: Synthetic oligonucleotide
  Target: COL7A1; (+) strand; PAM type: YTN; PAM sequence: CTC
agggctattcttggagcctg

SEQ ID NO: 32897 - DNA, 20 bp, Artificial Sequence
  Description of Artificial Sequence: Synthetic oligonucleotide
  Target: COL7A1; (+) strand; PAM type: YTN; PAM sequence: CTA
ttcttggagcctgagtcagc

SEQ ID NO: 32898 - DNA, 20 bp, Artificial Sequence
  Description of Artificial Sequence: Synthetic oligonucleotide
  Target: COL7A1; (+) strand; PAM type: YTN; PAM sequence: TTC
ttggagcctgagtcagcgga

SEQ ID NO: 32899 - DNA, 20 bp, Artificial Sequence
  Description of Artificial Sequence: Synthetic oligonucleotide
  Target: COL7A1; (+) strand; PAM type: YTN; PAM sequence: CTT
ggagcctgagtcagcggagg

SEQ ID NO: 32900 - DNA, 20 bp, Artificial Sequence
  Description of Artificial Sequence: Synthetic oligonucleotide
  Target: COL7A1; (+) strand; PAM type: YTN; PAM sequence: TTG
gagcctgagtcagcggaggc

SEQ ID NO: 32901 - DNA, 20 bp, Artificial Sequence
  Description of Artificial Sequence: Synthetic oligonucleotide
  Target: COL7A1; (+) strand; PAM type: YTN; PAM sequence: CTG
agtcagcggaggcaaaggat

SEQ ID NO: 32902 - DNA, 20 bp, Artificial Sequence
  Description of Artificial Sequence: Synthetic oligonucleotide
  Target: COL7A1; (+) strand; PAM type: YTN; PAM sequence: TTC
ctgccctgcttgtccaggca

SEQ ID NO: 32903 - DNA, 20 bp, Artificial Sequence
  Description of Artificial Sequence: Synthetic oligonucleotide
  Target: COL7A1; (+) strand; PAM type: YTN; PAM sequence: CTG
ccctgcttgtccaggcagca

SEQ ID NO: 32904 - DNA, 20 bp, Artificial Sequence
  Description of Artificial Sequence: Synthetic oligonucleotide
  Target: COL7A1; (+) strand; PAM type: YTN; PAM sequence: CTG
cttgtccaggcagcagttag

SEQ ID NO: 32905 - DNA, 20 bp, Artificial Sequence
  Description of Artificial Sequence: Synthetic oligonucleotide
  Target: COL7A1; (+) strand; PAM type: YTN; PAM sequence: CTT
gtccaggcagcagttagaaa

SEQ ID NO: 32906 - DNA, 20 bp, Artificial Sequence
  Description of Artificial Sequence: Synthetic oligonucleotide
  Target: COL7A1; (+) strand; PAM type: YTN; PAM sequence: TTG
tccaggcagcagttagaaac

SEQ ID NO: 32907 - DNA, 20 bp, Artificial Sequence
  Description of Artificial Sequence: Synthetic oligonucleotide
  Target: COL7A1; (+) strand; PAM type: YTN; PAM sequence: TTA
gaaaccaaatgagaacacta

SEQ ID NO: 32908 - DNA, 20 bp, Artificial Sequence
  Description of Artificial Sequence: Synthetic oligonucleotide
  Target: COL7A1; (+) strand; PAM type: YTN; PAM sequence: CTA
tgccccaggctatcctcctc

SEQ ID NO: 32909 - DNA, 20 bp, Artificial Sequence
  Description of Artificial Sequence: Synthetic oligonucleotide
  Target: COL7A1; (+) strand; PAM type: YTN; PAM sequence: CTA
tcctcctcccagaatgcaga

SEQ ID NO: 32910 - DNA, 20 bp, Artificial Sequence
  Description of Artificial Sequence: Synthetic oligonucleotide
  Target: COL7A1; (+) strand; PAM type: YTN; PAM sequence: CTC
ctcccagaatgcagagtaaa

SEQ ID NO: 32911 - DNA, 20 bp, Artificial Sequence
  Description of Artificial Sequence: Synthetic oligonucleotide
  Target: COL7A1; (+) strand; PAM type: YTN; PAM sequence: CTC
ccagaatgcagagtaaacac

SEQ ID NO: 32912 - DNA, 20 bp, Artificial Sequence
  Description of Artificial Sequence: Synthetic oligonucleotide
  Target: COL7A1; (+) strand; PAM type: YTN; PAM sequence: CTT
ggagacaccccttggcccct

SEQ ID NO: 32913 - DNA, 20 bp, Artificial Sequence
  Description of Artificial Sequence: Synthetic oligonucleotide
  Target: COL7A1; (+) strand; PAM type: YTN; PAM sequence: TTG
gagacaccccttggcccctt

SEQ ID NO: 32914 - DNA, 20 bp, Artificial Sequence
  Description of Artificial Sequence: Synthetic oligonucleotide
  Target: COL7A1; (+) strand; PAM type: YTN; PAM sequence: CTT
ggccccttctggtccaccag

SEQ ID NO: 32915 - DNA, 20 bp, Artificial Sequence
  Description of Artificial Sequence: Synthetic oligonucleotide
  Target: COL7A1; (+) strand; PAM type: YTN; PAM sequence: TTG
gccccttctggtccaccagg

SEQ ID NO: 32916 - DNA, 20 bp, Artificial Sequence
  Description of Artificial Sequence: Synthetic oligonucleotide
  Target: COL7A1; (+) strand; PAM type: YTN; PAM sequence: CTT
ctggtccaccagggaccacc

SEQ ID NO: 32917 - DNA, 20 bp, Artificial Sequence
  Description of Artificial Sequence: Synthetic oligonucleotide
  Target: COL7A1; (+) strand; PAM type: YTN; PAM sequence: TTC
tggtccaccagggaccacca

SEQ ID NO: 32918 - DNA, 20 bp, Artificial Sequence
  Description of Artificial Sequence: Synthetic oligonucleotide
  Target: COL7A1; (+) strand; PAM type: YTN; PAM sequence: CTG
gtccaccagggaccaccagg

SEQ ID NO: 32919 - DNA, 20 bp, Artificial Sequence
  Description of Artificial Sequence: Synthetic oligonucleotide
  Target: COL7A1; (+) strand; PAM type: YTN; PAM sequence: CTT
ggcacaaggtccacagtgag

SEQ ID NO: 32920 - DNA, 20 bp, Artificial Sequence
  Description of Artificial Sequence: Synthetic oligonucleotide
  Target: COL7A1; (+) strand; PAM type: YTN; PAM sequence: TTG
gcacaaggtccacagtgagg

SEQ ID NO: 32921 - DNA, 20 bp, Artificial Sequence
  Description of Artificial Sequence: Synthetic oligonucleotide
  Target: COL7A1; (+) strand; PAM type: YTN; PAM sequence: TTT
cccacctgagcctgcaggga

SEQ ID NO: 32922 - DNA, 20 bp, Artificial Sequence
  Description of Artificial Sequence: Synthetic oligonucleotide
  Target: COL7A1; (+) strand; PAM type: YTN; PAM sequence: TTC
ccacctgagcctgcagggat

SEQ ID NO: 32923 - DNA, 20 bp, Artificial Sequence
  Description of Artificial Sequence: Synthetic oligonucleotide
  Target: COL7A1; (+) strand; PAM type: YTN; PAM sequence: CTG
agcctgcagggattccaggc

SEQ ID NO: 32924 - DNA, 20 bp, Artificial Sequence
  Description of Artificial Sequence: Synthetic oligonucleotide
  Target: COL7A1; (+) strand; PAM type: YTN; PAM sequence: CTG
cagggattccaggctgggac

SEQ ID NO: 32925 - DNA, 20 bp, Artificial Sequence
  Description of Artificial Sequence: Synthetic oligonucleotide
  Target: COL7A1; (+) strand; PAM type: YTN; PAM sequence: TTC
caggctgggactcctacagg

SEQ ID NO: 32926 - DNA, 20 bp, Artificial Sequence
  Description of Artificial Sequence: Synthetic oligonucleotide
  Target: COL7A1; (+) strand; PAM type: YTN; PAM sequence: CTG
ggactcctacaggggcaaag

SEQ ID NO: 32927 - DNA, 20 bp, Artificial Sequence
  Description of Artificial Sequence: Synthetic oligonucleotide
  Target: COL7A1; (+) strand; PAM type: YTN; PAM sequence: CTC
ctacaggggcaaaggctggg

SEQ ID NO: 32928 - DNA, 20 bp, Artificial Sequence
  Description of Artificial Sequence: Synthetic oligonucleotide
  Target: COL7A1; (+) strand; PAM type: YTN; PAM sequence: CTA
caggggcaaaggctgggttt

SEQ ID NO: 32929 - DNA, 20 bp, Artificial Sequence
  Description of Artificial Sequence: Synthetic oligonucleotide
  Target: COL7A1; (+) strand; PAM type: YTN; PAM sequence: CTG
ggtttacacttcctatggac

SEQ ID NO: 32930 - DNA, 20 bp, Artificial Sequence
  Description of Artificial Sequence: Synthetic oligonucleotide
  Target: COL7A1; (+) strand; PAM type: YTN; PAM sequence: TTT
acacttcctatggactccca

SEQ ID NO: 32931 - DNA, 20 bp, Artificial Sequence
  Description of Artificial Sequence: Synthetic oligonucleotide
  Target: COL7A1; (+) strand; PAM type: YTN; PAM sequence: TTA
cacttcctatggactcccac

SEQ ID NO: 32932 - DNA, 20 bp, Artificial Sequence
  Description of Artificial Sequence: Synthetic oligonucleotide
  Target: COL7A1; (+) strand; PAM type: YTN; PAM sequence: CTT
cctatggactcccacagccc

SEQ ID NO: 32933 - DNA, 20 bp, Artificial Sequence
  Description of Artificial Sequence: Synthetic oligonucleotide
  Target: COL7A1; (+) strand; PAM type: YTN; PAM sequence: TTC
ctatggactcccacagccca

SEQ ID NO: 32934 - DNA, 20 bp, Artificial Sequence
  Description of Artificial Sequence: Synthetic oligonucleotide
  Target: COL7A1; (+) strand; PAM type: YTN; PAM sequence: CTA
tggactcccacagcccaatc

SEQ ID NO: 32935 - DNA, 20 bp, Artificial Sequence
  Description of Artificial Sequence: Synthetic oligonucleotide
  Target: COL7A1; (+) strand; PAM type: YTN; PAM sequence: CTC
ccacagcccaatcttgggac

SEQ ID NO: 32936 - DNA, 20 bp, Artificial Sequence
  Description of Artificial Sequence: Synthetic oligonucleotide
  Target: COL7A1; (+) strand; PAM type: YTN; PAM sequence: CTT
gggaccagctggctgaggaa

SEQ ID NO: 32937 - DNA, 20 bp, Artificial Sequence
  Description of Artificial Sequence: Synthetic oligonucleotide
  Target: COL7A1; (+) strand; PAM type: YTN; PAM sequence: TTG
ggaccagctggctgaggaac

SEQ ID NO: 32938 - DNA, 20 bp, Artificial Sequence
  Description of Artificial Sequence: Synthetic oligonucleotide
  Target: COL7A1; (+) strand; PAM type: YTN; PAM sequence: CTG
gctgaggaactcccctaagt

SEQ ID NO: 32939 - DNA, 20 bp, Artificial Sequence
  Description of Artificial Sequence: Synthetic oligonucleotide
  Target: COL7A1; (+) strand; PAM type: YTN; PAM sequence: CTG
aggaactcccctaagtggct

SEQ ID NO: 32940 - DNA, 20 bp, Artificial Sequence
  Description of Artificial Sequence: Synthetic oligonucleotide
  Target: COL7A1; (+) strand; PAM type: YTN; PAM sequence: CTC
ccctaagtggctgagtggaa

SEQ ID NO: 32941 - DNA, 20 bp, Artificial Sequence
  Description of Artificial Sequence: Synthetic oligonucleotide
  Target: COL7A1; (+) strand; PAM type: YTN; PAM sequence: CTA
agtggctgagtggaaacatc

SEQ ID NO: 32942 - DNA, 20 bp, Artificial Sequence
  Description of Artificial Sequence: Synthetic oligonucleotide
  Target: COL7A1; (+) strand; PAM type: YTN; PAM sequence: CTG
agtggaaacatctgggctca

SEQ ID NO: 32943 - DNA, 20 bp, Artificial Sequence
  Description of Artificial Sequence: Synthetic oligonucleotide
  Target: COL7A1; (+) strand; PAM type: YTN; PAM sequence: CTG
ggctcagctccctgtaggca

SEQ ID NO: 32944 - DNA, 20 bp, Artificial Sequence
  Description of Artificial Sequence: Synthetic oligonucleotide
  Target: COL7A1; (+) strand; PAM type: YTN; PAM sequence: CTC
agctccctgtaggcatcaaa

SEQ ID NO: 32945 - DNA, 20 bp, Artificial Sequence
  Description of Artificial Sequence: Synthetic oligonucleotide
  Target: COL7A1; (+) strand; PAM type: YTN; PAM sequence: CTC
cctgtaggcatcaaagactt

SEQ ID NO: 32946 - DNA, 20 bp, Artificial Sequence
  Description of Artificial Sequence: Synthetic oligonucleotide
  Target: COL7A1; (+) strand; PAM type: YTN; PAM sequence: CTG
taggcatcaaagacttccgg

SEQ ID NO: 32947 - DNA, 20 bp, Artificial Sequence
  Description of Artificial Sequence: Synthetic oligonucleotide
  Target: COL7A1; (+) strand; PAM type: YTN; PAM sequence: CTT
ccggcctcagctgcaacccc

SEQ ID NO: 32948 - DNA, 20 bp, Artificial Sequence
  Description of Artificial Sequence: Synthetic oligonucleotide
  Target: COL7A1; (+) strand; PAM type: YTN; PAM sequence: TTC
cggcctcagctgcaaccccc

SEQ ID NO: 32949 - DNA, 20 bp, Artificial Sequence
  Description of Artificial Sequence: Synthetic oligonucleotide
  Target: COL7A1; (+) strand; PAM type: YTN; PAM sequence: CTC
agctgcaacccccacgcttg

SEQ ID NO: 32950 - DNA, 20 bp, Artificial Sequence
  Description of Artificial Sequence: Synthetic oligonucleotide
  Target: COL7A1; (+) strand; PAM type: YTN; PAM sequence: CTG
caacccccacgcttgcccct

SEQ ID NO: 32951 - DNA, 20 bp, Artificial Sequence
  Description of Artificial Sequence: Synthetic oligonucleotide
  Target: COL7A1; (+) strand; PAM type: YTN; PAM sequence: CTT
gcccctggctgaggacacat

SEQ ID NO: 32952 - DNA, 20 bp, Artificial Sequence
  Description of Artificial Sequence: Synthetic oligonucleotide
  Target: COL7A1; (+) strand; PAM type: YTN; PAM sequence: TTG
cccctggctgaggacacatc

SEQ ID NO: 32953 - DNA, 20 bp, Artificial Sequence
  Description of Artificial Sequence: Synthetic oligonucleotide
  Target: COL7A1; (+) strand; PAM type: YTN; PAM sequence: CTG
gctgaggacacatcagcctg

SEQ ID NO: 32954 - DNA, 20 bp, Artificial Sequence
  Description of Artificial Sequence: Synthetic oligonucleotide
  Target: COL7A1; (+) strand; PAM type: YTN; PAM sequence: CTG
aggacacatcagcctgtggg

SEQ ID NO: 32955 - DNA, 20 bp, Artificial Sequence
  Description of Artificial Sequence: Synthetic oligonucleotide
  Target: COL7A1; (+) strand; PAM type: YTN; PAM sequence: CTG
tgggaaggcaggaggatcca

SEQ ID NO: 32956 - DNA, 20 bp, Artificial Sequence
  Description of Artificial Sequence: Synthetic oligonucleotide
  Target: COL7A1; (+) strand; PAM type: YTN; PAM sequence: CTA
gagggaagtccttgctcccc

SEQ ID NO: 32957 - DNA, 20 bp, Artificial Sequence
  Description of Artificial Sequence: Synthetic oligonucleotide
  Target: COL7A1; (+) strand; PAM type: YTN; PAM sequence: CTT
gctccccatctactgcccca

SEQ ID NO: 32958 - DNA, 20 bp, Artificial Sequence
  Description of Artificial Sequence: Synthetic oligonucleotide
  Target: COL7A1; (+) strand; PAM type: YTN; PAM sequence: TTG
ctccccatctactgccccat

SEQ ID NO: 32959 - DNA, 20 bp, Artificial Sequence
  Description of Artificial Sequence: Synthetic oligonucleotide
  Target: COL7A1; (+) strand; PAM type: YTN; PAM sequence: CTC
cccatctactgccccatgga

SEQ ID NO: 32960 - DNA, 20 bp, Artificial Sequence
  Description of Artificial Sequence: Synthetic oligonucleotide
  Target: COL7A1; (+) strand; PAM type: YTN; PAM sequence: CTA
ctgccccatggactccatgc

SEQ ID NO: 32961 - DNA, 20 bp, Artificial Sequence
  Description of Artificial Sequence: Synthetic oligonucleotide
  Target: COL7A1; (+) strand; PAM type: YTN; PAM sequence: CTG
ccccatggactccatgccaa

SEQ ID NO: 32962 - DNA, 20 bp, Artificial Sequence
  Description of Artificial Sequence: Synthetic oligonucleotide
  Target: COL7A1; (+) strand; PAM type: YTN; PAM sequence: CTC
catgccaatgccaaaagagg

SEQ ID NO: 32963 - DNA, 20 bp, Artificial Sequence
  Description of Artificial Sequence: Synthetic oligonucleotide
  Target: COL7A1; (+) strand; PAM type: YTN; PAM sequence: CTT
ctcagcagaggattttattg

SEQ ID NO: 32964 - DNA, 20 bp, Artificial Sequence
  Description of Artificial Sequence: Synthetic oligonucleotide
  Target: COL7A1; (+) strand; PAM type: YTN; PAM sequence: TTC
tcagcagaggattttattgg

SEQ ID NO: 32965 - DNA, 20 bp, Artificial Sequence
  Description of Artificial Sequence: Synthetic oligonucleotide
  Target: COL7A1; (+) strand; PAM type: YTN; PAM sequence: CTC
agcagaggattttattggtg

SEQ ID NO: 32966 - DNA, 20 bp, Artificial Sequence
  Description of Artificial Sequence: Synthetic oligonucleotide
  Target: COL7A1; (+) strand; PAM type: YTN; PAM sequence: TTT
tattggtggtcacctgtggc

SEQ ID NO: 32967 - DNA, 20 bp, Artificial Sequence
  Description of Artificial Sequence: Synthetic oligonucleotide
  Target: COL7A1; (+) strand; PAM type: YTN; PAM sequence: TTT
attggtggtcacctgtggca

SEQ ID NO: 32968 - DNA, 20 bp, Artificial Sequence
  Description of Artificial Sequence: Synthetic oligonucleotide
  Target: COL7A1; (+) strand; PAM type: YTN; PAM sequence: TTA
ttggtggtcacctgtggcac

SEQ ID NO: 32969 - DNA, 20 bp, Artificial Sequence
  Description of Artificial Sequence: Synthetic oligonucleotide
  Target: COL7A1; (+) strand; PAM type: YTN; PAM sequence: TTG
gtggtcacctgtggcacagg

SEQ ID NO: 32970 - DNA, 20 bp, Artificial Sequence
  Description of Artificial Sequence: Synthetic oligonucleotide
  Target: COL7A1; (+) strand; PAM type: YTN; PAM sequence: CTG
tggcacaggttagaggagcc

SEQ ID NO: 32971 - DNA, 20 bp, Artificial Sequence
  Description of Artificial Sequence: Synthetic oligonucleotide
  Target: COL7A1; (+) strand; PAM type: YTN; PAM sequence: TTA
gaggagccgaagtgctgtgt

SEQ ID NO: 32972 - DNA, 20 bp, Artificial Sequence
  Description of Artificial Sequence: Synthetic oligonucleotide
  Target: COL7A1; (+) strand; PAM type: YTN; PAM sequence: CTG
tgtttgtggtggggggggga

SEQ ID NO: 32973 - DNA, 20 bp, Artificial Sequence
  Description of Artificial Sequence: Synthetic oligonucleotide
  Target: COL7A1; (+) strand; PAM type: YTN; PAM sequence: TTT
gtggtgggggggggaccaca

SEQ ID NO: 32974 - DNA, 20 bp, Artificial Sequence
  Description of Artificial Sequence: Synthetic oligonucleotide
  Target: COL7A1; (+) strand; PAM type: YTN; PAM sequence: TTG
tggtgggggggggaccacaa

SEQ ID NO: 32975 - DNA, 20 bp, Artificial Sequence
  Description of Artificial Sequence: Synthetic oligonucleotide
  Target: COL7A1; (+) strand; PAM type: YTN; PAM sequence: CTG
ccctcttgcttacataggct

SEQ ID NO: 32976 - DNA, 20 bp, Artificial Sequence
  Description of Artificial Sequence: Synthetic oligonucleotide
  Target: COL7A1; (+) strand; PAM type: YTN; PAM sequence: CTC
ttgcttacataggcttcccg

SEQ ID NO: 32977 - DNA, 20 bp, Artificial Sequence
  Description of Artificial Sequence: Synthetic oligonucleotide
  Target: COL7A1; (+) strand; PAM type: YTN; PAM sequence: CTT
gcttacataggcttcccgcc

SEQ ID NO: 32978 - DNA, 20 bp, Artificial Sequence
  Description of Artificial Sequence: Synthetic oligonucleotide
  Target: COL7A1; (+) strand; PAM type: YTN; PAM sequence: TTG
cttacataggcttcccgcct

SEQ ID NO: 32979 - DNA, 20 bp, Artificial Sequence
  Description of Artificial Sequence: Synthetic oligonucleotide
  Target: COL7A1; (+) strand; PAM type: YTN; PAM sequence: CTT
acataggcttcccgcctaga

SEQ ID NO: 32980 - DNA, 20 bp, Artificial Sequence
  Description of Artificial Sequence: Synthetic oligonucleotide
  Target: COL7A1; (+) strand; PAM type: YTN; PAM sequence: TTA
cataggcttcccgcctagaa

SEQ ID NO: 32981 - DNA, 20 bp, Artificial Sequence
  Description of Artificial Sequence: Synthetic oligonucleotide
  Target: COL7A1; (+) strand; PAM type: YTN; PAM sequence: CTT
cccgcctagaagcgcagcca

SEQ ID NO: 32982 - DNA, 20 bp, Artificial Sequence
  Description of Artificial Sequence: Synthetic oligonucleotide
  Target: COL7A1; (+) strand; PAM type: YTN; PAM sequence: TTC
ccgcctagaagcgcagccag

SEQ ID NO: 32983 - DNA, 20 bp, Artificial Sequence
  Description of Artificial Sequence: Synthetic oligonucleotide
  Target: COL7A1; (+) strand; PAM type: YTN; PAM sequence: CTA
gaagcgcagccagaacatgc

SEQ ID NO: 32984 - DNA, 20 bp, Artificial Sequence
  Description of Artificial Sequence: Synthetic oligonucleotide
  Target: COL7A1; (+) strand; PAM type: YTN; PAM sequence: CTA
cggatccggttgtagtctgg

SEQ ID NO: 32985 - DNA, 20 bp, Artificial Sequence
  Description of Artificial Sequence: Synthetic oligonucleotide
  Target: COL7A1; (+) strand; PAM type: YTN; PAM sequence: TTG
tagtctgggagctgctcaat

SEQ ID NO: 32986 - DNA, 20 bp, Artificial Sequence
  Description of Artificial Sequence: Synthetic oligonucleotide
  Target: COL7A1; (+) strand; PAM type: YTN; PAM sequence: CTG
ggagctgctcaatggggcct

SEQ ID NO: 32987 - DNA, 20 bp, Artificial Sequence
  Description of Artificial Sequence: Synthetic oligonucleotide
  Target: COL7A1; (+) strand; PAM type: YTN; PAM sequence: CTG
ctcaatggggcctgtgggga

SEQ ID NO: 32988 - DNA, 20 bp, Artificial Sequence
  Description of Artificial Sequence: Synthetic oligonucleotide
  Target: COL7A1; (+) strand; PAM type: YTN; PAM sequence: CTC
aatggggcctgtggggatag

SEQ ID NO: 32989 - DNA, 20 bp, Artificial Sequence
  Description of Artificial Sequence: Synthetic oligonucleotide
  Target: COL7A1; (+) strand; PAM type: YTN; PAM sequence: CTG
tggggatagggtggagcgtc

SEQ ID NO: 32990 - DNA, 20 bp, Artificial Sequence
  Description of Artificial Sequence: Synthetic oligonucleotide
  Target: COL7A1; (+) strand; PAM type: YTN; PAM sequence: CTG
gcctgcacagggacacctgg

SEQ ID NO: 32991 - DNA, 20 bp, Artificial Sequence
  Description of Artificial Sequence: Synthetic oligonucleotide
  Target: COL7A1; (+) strand; PAM type: YTN; PAM sequence: CTG
cacagggacacctggccctg

SEQ ID NO: 32992 - DNA, 20 bp, Artificial Sequence
  Description of Artificial Sequence: Synthetic oligonucleotide
  Target: COL7A1; (+) strand; PAM type: YTN; PAM sequence: CTG
gccctgtgccgcacccagct

SEQ ID NO: 32993 - DNA, 20 bp, Artificial Sequence
  Description of Artificial Sequence: Synthetic oligonucleotide
  Target: COL7A1; (+) strand; PAM type: YTN; PAM sequence: CTG
tgccgcacccagctcggaga

SEQ ID NO: 32994 - DNA, 20 bp, Artificial Sequence
  Description of Artificial Sequence: Synthetic oligonucleotide
  Target: COL7A1; (+) strand; PAM type: YTN; PAM sequence: CTC
ggagatgctgcccagagcag

SEQ ID NO: 32995 - DNA, 20 bp, Artificial Sequence
  Description of Artificial Sequence: Synthetic oligonucleotide
  Target: COL7A1; (+) strand; PAM type: YTN; PAM sequence: CTG
cccagagcagcacaagacag

SEQ ID NO: 32996 - DNA, 20 bp, Artificial Sequence
  Description of Artificial Sequence: Synthetic oligonucleotide
  Target: COL7A1; (+) strand; PAM type: YTN; PAM sequence: CTT
tgagtggaaagagaggagag

SEQ ID NO: 32997 - DNA, 20 bp, Artificial Sequence
  Description of Artificial Sequence: Synthetic oligonucleotide
  Target: COL7A1; (+) strand; PAM type: YTN; PAM sequence: TTT
gagtggaaagagaggagaga

SEQ ID NO: 32998 - DNA, 20 bp, Artificial Sequence
  Description of Artificial Sequence: Synthetic oligonucleotide
  Target: COL7A1; (+) strand; PAM type: YTN; PAM sequence: TTG
agtggaaagagaggagagaa

SEQ ID NO: 32999 - DNA, 20 bp, Artificial Sequence
  Description of Artificial Sequence: Synthetic oligonucleotide
  Target: COL7A1; (+) strand; PAM type: YTN; PAM sequence: TTC
ccccaggggtgctgagcctg

SEQ ID NO: 33000 - DNA, 20 bp, Artificial Sequence
  Description of Artificial Sequence: Synthetic oligonucleotide
  Target: COL7A1; (+) strand; PAM type: YTN; PAM sequence: CTG
agcctgtcccttcatgttct

SEQ ID NO: 33001 - DNA, 20 bp, Artificial Sequence
  Description of Artificial Sequence: Synthetic oligonucleotide
  Target: COL7A1; (+) strand; PAM type: YTN; PAM sequence: CTG
tcccttcatgttctggccct

SEQ ID NO: 33002 - DNA, 20 bp, Artificial Sequence
  Description of Artificial Sequence: Synthetic oligonucleotide
  Target: COL7A1; (+) strand; PAM type: YTN; PAM sequence: CTT
catgttctggcccttgaagc

SEQ ID NO: 33003 - DNA, 20 bp, Artificial Sequence
  Description of Artificial Sequence: Synthetic oligonucleotide
  Target: COL7A1; (+) strand; PAM type: YTN; PAM sequence: TTC
atgttctggcccttgaagcc

SEQ ID NO: 33004 - DNA, 20 bp, Artificial Sequence
  Description of Artificial Sequence: Synthetic oligonucleotide
  Target: COL7A1; (+) strand; PAM type: YTN; PAM sequence: TTC
tggcccttgaagccccaccc

SEQ ID NO: 33005 - DNA, 20 bp, Artificial Sequence
  Description of Artificial Sequence: Synthetic oligonucleotide
  Target: COL7A1; (+) strand; PAM type: YTN; PAM sequence: CTG
gcccttgaagccccacccca

SEQ ID NO: 33006 - DNA, 20 bp, Artificial Sequence
  Description of Artificial Sequence: Synthetic oligonucleotide
  Target: COL7A1; (+) strand; PAM type: YTN; PAM sequence: CTT
gaagccccaccccacatgga

SEQ ID NO: 33007 - DNA, 20 bp, Artificial Sequence
  Description of Artificial Sequence: Synthetic oligonucleotide
  Target: COL7A1; (+) strand; PAM type: YTN; PAM sequence: TTG
aagccccaccccacatggag

SEQ ID NO: 33008 - DNA, 20 bp, Artificial Sequence
  Description of Artificial Sequence: Synthetic oligonucleotide
  Target: COL7A1; (+) strand; PAM type: YTN; PAM sequence: TTA
cctgacgggtgcagggtatt

SEQ ID NO: 33009 - DNA, 20 bp, Artificial Sequence
  Description of Artificial Sequence: Synthetic oligonucleotide
  Target: COL7A1; (+) strand; PAM type: YTN; PAM sequence: CTG
acgggtgcagggtattgatg

SEQ ID NO: 33010 - DNA, 20 bp, Artificial Sequence
  Description of Artificial Sequence: Synthetic oligonucleotide
  Target: COL7A1; (+) strand; PAM type: YTN; PAM sequence: TTG
atgaaggcaccttggcaggc

SEQ ID NO: 33011 - DNA, 20 bp, Artificial Sequence
  Description of Artificial Sequence: Synthetic oligonucleotide
  Target: COL7A1; (+) strand; PAM type: YTN; PAM sequence: CTT
ggcaggcagtcaaggaactg

SEQ ID NO: 33012 - DNA, 20 bp, Artificial Sequence
  Description of Artificial Sequence: Synthetic oligonucleotide
  Target: COL7A1; (+) strand; PAM type: YTN; PAM sequence: TTG
gcaggcagtcaaggaactgc

SEQ ID NO: 33013 - DNA, 20 bp, Artificial Sequence
  Description of Artificial Sequence: Synthetic oligonucleotide
  Target: COL7A1; (+) strand; PAM type: YTN; PAM sequence: CTG
ctgggacaggttttctgagc

SEQ ID NO: 33014 - DNA, 20 bp, Artificial Sequence
  Description of Artificial Sequence: Synthetic oligonucleotide
  Target: COL7A1; (+) strand; PAM type: YTN; PAM sequence: CTG
ggacaggttttctgagcaag

SEQ ID NO: 33015 - DNA, 20 bp, Artificial Sequence
  Description of Artificial Sequence: Synthetic oligonucleotide
  Target: COL7A1; (+) strand; PAM type: YTN; PAM sequence: TTT
tctgagcaagaactccctgg

SEQ ID NO: 33016 - DNA, 20 bp, Artificial Sequence
  Description of Artificial Sequence: Synthetic oligonucleotide
  Target: COL7A1; (+) strand; PAM type: YTN; PAM sequence: TTT
ctgagcaagaactccctggc

SEQ ID NO: 33017 - DNA, 20 bp, Artificial Sequence
  Description of Artificial Sequence: Synthetic oligonucleotide
  Target: COL7A1; (+) strand; PAM type: YTN; PAM sequence: TTC
tgagcaagaactccctggca

SEQ ID NO: 33018 - DNA, 20 bp, Artificial Sequence
  Description of Artificial Sequence: Synthetic oligonucleotide
  Target: COL7A1; (+) strand; PAM type: YTN; PAM sequence: CTG
agcaagaactccctggcagc

SEQ ID NO: 33019 - DNA, 20 bp, Artificial Sequence
  Description of Artificial Sequence: Synthetic oligonucleotide
  Target: COL7A1; (+) strand; PAM type: YTN; PAM sequence: CTC
cctggcagccaggggactgg

SEQ ID NO: 33020 - DNA, 20 bp, Artificial Sequence
  Description of Artificial Sequence: Synthetic oligonucleotide
  Target: COL7A1; (+) strand; PAM type: YTN; PAM sequence: CTG
gcagccaggggactggggag

SEQ ID NO: 33021 - DNA, 20 bp, Artificial Sequence
  Description of Artificial Sequence: Synthetic oligonucleotide
  Target: COL7A1; (+) strand; PAM type: YTN; PAM sequence: CTG
gggagagctgcttggggcct

SEQ ID NO: 33022 - DNA, 20 bp, Artificial Sequence
  Description of Artificial Sequence: Synthetic oligonucleotide
  Target: COL7A1; (+) strand; PAM type: YTN; PAM sequence: CTG
cttggggccttaactggctg

SEQ ID NO: 33023 - DNA, 20 bp, Artificial Sequence
  Description of Artificial Sequence: Synthetic oligonucleotide
  Target: COL7A1; (+) strand; PAM type: YTN; PAM sequence: CTT
ggggccttaactggctgctc

SEQ ID NO: 33024 - DNA, 20 bp, Artificial Sequence
  Description of Artificial Sequence: Synthetic oligonucleotide
  Target: COL7A1; (+) strand; PAM type: YTN; PAM sequence: TTG
gggccttaactggctgctct

SEQ ID NO: 33025 - DNA, 20 bp, Artificial Sequence
  Description of Artificial Sequence: Synthetic oligonucleotide
  Target: COL7A1; (+) strand; PAM type: YTN; PAM sequence: CTT
aactggctgctctgtaagct

SEQ ID NO: 33026 - DNA, 20 bp, Artificial Sequence
  Description of Artificial Sequence: Synthetic oligonucleotide
  Target: COL7A1; (+) strand; PAM type: YTN; PAM sequence: TTA
actggctgctctgtaagctg

SEQ ID NO: 33027 - DNA, 20 bp, Artificial Sequence
  Description of Artificial Sequence: Synthetic oligonucleotide
  Target: COL7A1; (+) strand; PAM type: YTN; PAM sequence: CTG
gctgctctgtaagctgagca

SEQ ID NO: 33028 - DNA, 20 bp, Artificial Sequence
  Description of Artificial Sequence: Synthetic oligonucleotide
  Target: COL7A1; (+) strand; PAM type: YTN; PAM sequence: CTG
ctctgtaagctgagcagcag

SEQ ID NO: 33029 - DNA, 20 bp, Artificial Sequence
  Description of Artificial Sequence: Synthetic oligonucleotide
  Target: COL7A1; (+) strand; PAM type: YTN; PAM sequence: CTC
tgtaagctgagcagcagtgc

SEQ ID NO: 33030 - DNA, 20 bp, Artificial Sequence
  Description of Artificial Sequence: Synthetic oligonucleotide
  Target: COL7A1; (+) strand; PAM type: YTN; PAM sequence: CTG
taagctgagcagcagtgcgg

SEQ ID NO: 33031 - DNA, 20 bp, Artificial Sequence
  Description of Artificial Sequence: Synthetic oligonucleotide
  Target: COL7A1; (+) strand; PAM type: YTN; PAM sequence: CTG
agcagcagtgcgggagcaga

SEQ ID NO: 33032 - DNA, 20 bp, Artificial Sequence
  Description of Artificial Sequence: Synthetic oligonucleotide
  Target: COL7A1; (+) strand; PAM type: YTN; PAM sequence: CTG
aggaaataaacaaagagcag

SEQ ID NO: 33033 - DNA, 20 bp, Artificial Sequence
  Description of Artificial Sequence: Synthetic oligonucleotide
  Target: COL7A1; (+) strand; PAM type: YTN; PAM sequence: CTA
ggccacttaccatatccagc

SEQ ID NO: 33034 - DNA, 20 bp, Artificial Sequence
  Description of Artificial Sequence: Synthetic oligonucleotide
  Target: COL7A1; (+) strand; PAM type: YTN; PAM sequence: CTT
accatatccagccactgctg

SEQ ID NO: 33035 - DNA, 20 bp, Artificial Sequence
  Description of Artificial Sequence: Synthetic oligonucleotide
  Target: COL7A1; (+) strand; PAM type: YTN; PAM sequence: TTA
ccatatccagccactgctgg

SEQ ID NO: 33036 - DNA, 20 bp, Artificial Sequence
  Description of Artificial Sequence: Synthetic oligonucleotide
  Target: COL7A1; (+) strand; PAM type: YTN; PAM sequence: CTG
ctgggcactggtcatagatg

SEQ ID NO: 33037 - DNA, 20 bp, Artificial Sequence
  Description of Artificial Sequence: Synthetic oligonucleotide
  Target: COL7A1; (+) strand; PAM type: YTN; PAM sequence: CTG
ggcactggtcatagatgtac

SEQ ID NO: 33038 - DNA, 20 bp, Artificial Sequence
  Description of Artificial Sequence: Synthetic oligonucleotide
  Target: COL7A1; (+) strand; PAM type: YTN; PAM sequence: CTG
gtcatagatgtacttggagc

SEQ ID NO: 33039 - DNA, 20 bp, Artificial Sequence
  Description of Artificial Sequence: Synthetic oligonucleotide
  Target: COL7A1; (+) strand; PAM type: YTN; PAM sequence: CTT
ggagcagatctcacgtacca

SEQ ID NO: 33040 - DNA, 20 bp, Artificial Sequence
  Description of Artificial Sequence: Synthetic oligonucleotide
  Target: COL7A1; (+) strand; PAM type: YTN; PAM sequence: TTG
gagcagatctcacgtaccac

SEQ ID NO: 33041 - DNA, 20 bp, Artificial Sequence
  Description of Artificial Sequence: Synthetic oligonucleotide
  Target: COL7A1; (+) strand; PAM type: YTN; PAM sequence: CTC
acgtaccacactggcatcca

SEQ ID NO: 33042 - DNA, 20 bp, Artificial Sequence
  Description of Artificial Sequence: Synthetic oligonucleotide
  Target: COL7A1; (+) strand; PAM type: YTN; PAM sequence: CTG
gcatccacctcctgcagggt

SEQ ID NO: 33043 - DNA, 20 bp, Artificial Sequence
  Description of Artificial Sequence: Synthetic oligonucleotide
  Target: COL7A1; (+) strand; PAM type: YTN; PAM sequence: CTC
ctgcagggtgaggcagaggg

SEQ ID NO: 33044 - DNA, 20 bp, Artificial Sequence
  Description of Artificial Sequence: Synthetic oligonucleotide
  Target: COL7A1; (+) strand; PAM type: YTN; PAM sequence: CTG
cagggtgaggcagagggcat

SEQ ID NO: 33045 - DNA, 20 bp, Artificial Sequence
  Description of Artificial Sequence: Synthetic oligonucleotide
  Target: COL7A1; (+) strand; PAM type: YTN; PAM sequence: CTG
gctaacgggcacctggccac

SEQ ID NO: 33046 - DNA, 20 bp, Artificial Sequence
  Description of Artificial Sequence: Synthetic oligonucleotide
  Target: COL7A1; (+) strand; PAM type: YTN; PAM sequence: CTA
acgggcacctggccaccacc

SEQ ID NO: 33047 - DNA, 20 bp, Artificial Sequence
  Description of Artificial Sequence: Synthetic oligonucleotide
  Target: COL7A1; (+) strand; PAM type: YTN; PAM sequence: CTG
gccaccacctcagccagtca

SEQ ID NO: 33048 - DNA, 20 bp, Artificial Sequence
  Description of Artificial Sequence: Synthetic oligonucleotide
  Target: COL7A1; (+) strand; PAM type: YTN; PAM sequence: CTC
agccagtcagcatcatccaa

SEQ ID NO: 33049 - DNA, 20 bp, Artificial Sequence
  Description of Artificial Sequence: Synthetic oligonucleotide
  Target: COL7A1; (+) strand; PAM type: YTN; PAM sequence: CTA
gcagagatctcccacaggca

SEQ ID NO: 33050 - DNA, 20 bp, Artificial Sequence
  Description of Artificial Sequence: Synthetic oligonucleotide
  Target: COL7A1; (+) strand; PAM type: YTN; PAM sequence: CTC
ccacaggcagcatgcagctg

SEQ ID NO: 33051 - DNA, 20 bp, Artificial Sequence
  Description of Artificial Sequence: Synthetic oligonucleotide
  Target: COL7A1; (+) strand; PAM type: YTN; PAM sequence: CTG
tccccagcccaaaagaggaa

SEQ ID NO: 33052 - DNA, 20 bp, Artificial Sequence
  Description of Artificial Sequence: Synthetic oligonucleotide
  Target: COL7A1; (+) strand; PAM type: YTN; PAM sequence: CTG
ctatagacctccatgggccc

SEQ ID NO: 33053 - DNA, 20 bp, Artificial Sequence
  Description of Artificial Sequence: Synthetic oligonucleotide
  Target: COL7A1; (+) strand; PAM type: YTN; PAM sequence: CTA
tagacctccatgggccccgc

SEQ ID NO: 33054 - DNA, 20 bp, Artificial Sequence
  Description of Artificial Sequence: Synthetic oligonucleotide
  Target: COL7A1; (+) strand; PAM type: YTN; PAM sequence: CTC
catgggccccgcccatctcc

SEQ ID NO: 33055 - DNA, 20 bp, Artificial Sequence
  Description of Artificial Sequence: Synthetic oligonucleotide
  Target: COL7A1; (+) strand; PAM type: YTN; PAM sequence: CTC
cacagccatcagcacctatg

SEQ ID NO: 33056 - DNA, 20 bp, Artificial Sequence
  Description of Artificial Sequence: Synthetic oligonucleotide
  Target: COL7A1; (+) strand; PAM type: YTN; PAM sequence: CTA
tgccctgccctcccactatg

SEQ ID NO: 33057 - DNA, 20 bp, Artificial Sequence
  Description of Artificial Sequence: Synthetic oligonucleotide
  Target: COL7A1; (+) strand; PAM type: YTN; PAM sequence: CTG
ccctcccactatgctacccc

SEQ ID NO: 33058 - DNA, 20 bp, Artificial Sequence
  Description of Artificial Sequence: Synthetic oligonucleotide
  Target: COL7A1; (+) strand; PAM type: YTN; PAM sequence: CTC
ccactatgctacccctgcag

SEQ ID NO: 33059 - DNA, 20 bp, Artificial Sequence
  Description of Artificial Sequence: Synthetic oligonucleotide
  Target: COL7A1; (+) strand; PAM type: YTN; PAM sequence: CTA
tgctacccctgcaggtgaca

SEQ ID NO: 33060 - DNA, 20 bp, Artificial Sequence
  Description of Artificial Sequence: Synthetic oligonucleotide
  Target: COL7A1; (+) strand; PAM type: YTN; PAM sequence: CTA
cccctgcaggtgacagctgc

SEQ ID NO: 33061 - DNA, 20 bp, Artificial Sequence
  Description of Artificial Sequence: Synthetic oligonucleotide
  Target: COL7A1; (+) strand; PAM type: YTN; PAM sequence: CTG
caggtgacagctgcctagga

SEQ ID NO: 33062 - DNA, 20 bp, Artificial Sequence
  Description of Artificial Sequence: Synthetic oligonucleotide
  Target: COL7A1; (+) strand; PAM type: YTN; PAM sequence: CTG
cctaggacaccagggatgcc

SEQ ID NO: 33063 - DNA, 20 bp, Artificial Sequence
  Description of Artificial Sequence: Synthetic oligonucleotide
  Target: COL7A1; (+) strand; PAM type: YTN; PAM sequence: CTA
ggacaccagggatgcctata

SEQ ID NO: 33064 - DNA, 20 bp, Artificial Sequence
  Description of Artificial Sequence: Synthetic oligonucleotide
  Target: COL7A1; (+) strand; PAM type: YTN; PAM sequence: CTA
taggagcaggctgcgctatg

SEQ ID NO: 33065 - DNA, 20 bp, Artificial Sequence
  Description of Artificial Sequence: Synthetic oligonucleotide
  Target: COL7A1; (+) strand; PAM type: YTN; PAM sequence: CTG
cgctatgccaggccccaacc

SEQ ID NO: 33066 - DNA, 20 bp, Artificial Sequence
  Description of Artificial Sequence: Synthetic oligonucleotide
  Target: COL7A1; (+) strand; PAM type: YTN; PAM sequence: CTA
tgccaggccccaaccctaca

SEQ ID NO: 33067 - DNA, 20 bp, Artificial Sequence
  Description of Artificial Sequence: Synthetic oligonucleotide
  Target: COL7A1; (+) strand; PAM type: YTN; PAM sequence: CTA
cacctcccaggtgtctgcca

SEQ ID NO: 33068 - DNA, 20 bp, Artificial Sequence
  Description of Artificial Sequence: Synthetic oligonucleotide
  Target: COL7A1; (+) strand; PAM type: YTN; PAM sequence: CTC
ccaggtgtctgccaggccaa

SEQ ID NO: 33069 - DNA, 20 bp, Artificial Sequence
  Description of Artificial Sequence: Synthetic oligonucleotide
  Target: COL7A1; (+) strand; PAM type: YTN; PAM sequence: CTG
ccaggccaagactccagaac

SEQ ID NO: 33070 - DNA, 20 bp, Artificial Sequence
  Description of Artificial Sequence: Synthetic oligonucleotide
  Target: COL7A1; (+) strand; PAM type: YTN; PAM sequence: CTC
cagaacctctcccaggggtc

SEQ ID NO: 33071 - DNA, 20 bp, Artificial Sequence
  Description of Artificial Sequence: Synthetic oligonucleotide
  Target: COL7A1; (+) strand; PAM type: YTN; PAM sequence: CTC
tcccaggggtccatgttacc

SEQ ID NO: 33072 - DNA, 20 bp, Artificial Sequence
  Description of Artificial Sequence: Synthetic oligonucleotide
  Target: COL7A1; (+) strand; PAM type: YTN; PAM sequence: CTC
ccaggggtccatgttaccgc

SEQ ID NO: 33073 - DNA, 20 bp, Artificial Sequence
  Description of Artificial Sequence: Synthetic oligonucleotide
  Target: COL7A1; (+) strand; PAM type: YTN; PAM sequence: TTA
ccgcaatccggctttcccat

SEQ ID NO: 33074 - DNA, 20 bp, Artificial Sequence
  Description of Artificial Sequence: Synthetic oligonucleotide
  Target: COL7A1; (+) strand; PAM type: YTN; PAM sequence: CTT
tcccattcagccagggggat

SEQ ID NO: 33075 - DNA, 20 bp, Artificial Sequence
  Description of Artificial Sequence: Synthetic oligonucleotide
  Target: COL7A1; (+) strand; PAM type: YTN; PAM sequence: TTT
cccattcagccagggggatg

SEQ ID NO: 33076 - DNA, 20 bp, Artificial Sequence
  Description of Artificial Sequence: Synthetic oligonucleotide
  Target: COL7A1; (+) strand; PAM type: YTN; PAM sequence: TTC
ccattcagccagggggatgc

SEQ ID NO: 33077 - DNA, 20 bp, Artificial Sequence
  Description of Artificial Sequence: Synthetic oligonucleotide
  Target: COL7A1; (+) strand; PAM type: YTN; PAM sequence: TTC
agccagggggatgcggcggc

SEQ ID NO: 33078 - DNA, 20 bp, Artificial Sequence
  Description of Artificial Sequence: Synthetic oligonucleotide
  Target: COL7A1; (+) strand; PAM type: YTN; PAM sequence: CTG
cgtccgatgtcctcacacac

SEQ ID NO: 33079 - DNA, 20 bp, Artificial Sequence
  Description of Artificial Sequence: Synthetic oligonucleotide
  Target: COL7A1; (+) strand; PAM type: YTN; PAM sequence: CTC
acacacaggagtagtgcctt

SEQ ID NO: 33080 - DNA, 20 bp, Artificial Sequence
  Description of Artificial Sequence: Synthetic oligonucleotide
  Target: COL7A1; (+) strand; PAM type: YTN; PAM sequence: CTT
taagggtgagagaaggctca

SEQ ID NO: 33081 - DNA, 20 bp, Artificial Sequence
  Description of Artificial Sequence: Synthetic oligonucleotide
  Target: COL7A1; (+) strand; PAM type: YTN; PAM sequence: TTT
aagggtgagagaaggctcag

SEQ ID NO: 33082 - DNA, 20 bp, Artificial Sequence
  Description of Artificial Sequence: Synthetic oligonucleotide
  Target: COL7A1; (+) strand; PAM type: YTN; PAM sequence: TTA
agggtgagagaaggctcaga

SEQ ID NO: 33083 - DNA, 20 bp, Artificial Sequence
  Description of Artificial Sequence: Synthetic oligonucleotide
  Target: COL7A1; (+) strand; PAM type: YTN; PAM sequence: CTC
agaggtccacccagcccaat

SEQ ID NO: 33084 - DNA, 20 bp, Artificial Sequence
  Description of Artificial Sequence: Synthetic oligonucleotide
  Target: COL7A1; (+) strand; PAM type: YTN; PAM sequence: CTG
gacccacaggtacacaaaca

SEQ ID NO: 33085 - DNA, 20 bp, Artificial Sequence
  Description of Artificial Sequence: Synthetic oligonucleotide
  Target: COL7A1; (+) strand; PAM type: YTN; PAM sequence: CTC
cagcctcaggttgacaagga

SEQ ID NO: 33086 - DNA, 20 bp, Artificial Sequence
  Description of Artificial Sequence: Synthetic oligonucleotide
  Target: COL7A1; (+) strand; PAM type: YTN; PAM sequence: CTC
aggttgacaaggacctccct

SEQ ID NO: 33087 - DNA, 20 bp, Artificial Sequence
  Description of Artificial Sequence: Synthetic oligonucleotide
  Target: COL7A1; (+) strand; PAM type: YTN; PAM sequence: TTG
acaaggacctccctgacctc

SEQ ID NO: 33088 - DNA, 20 bp, Artificial Sequence
  Description of Artificial Sequence: Synthetic oligonucleotide
  Target: COL7A1; (+) strand; PAM type: YTN; PAM sequence: CTC
cctgacctcatgctgactca

SEQ ID NO: 33089-33118 - skipped (30 entries)

SEQ ID NO: 33119 - DNA, 23 bp, Artificial Sequence
  Description of Artificial Sequence: Synthetic oligonucleotide
  modified_base (1)..(21): a, c, t, g, unknown or other
nnnnnnnnnnnnnnnnnnnnnrg

SEQ ID NO: 33120 - RNA, 100 nt, Artificial Sequence
  chemically synthesized
  misc_feature (1)..(20): n is a, c, g, u, or other
nnnnnnnnnnnnnnnnnnnnguuuuagagcuagaaauagcaaguuaaaauaaggcuaguccguuaucaacuugaaaaaguggcaccgagucggugcuuuu

SEQ ID NO: 33121 - RNA, 96 nt, Artificial Sequence
  chemically synthesized
  misc_feature (1)..(20): n is a, c, g, u, or other
nnnnnnnnnnnnnnnnnnnnguuuuagagcuagaaauagcaaguuaaaauaaggcuaguccguuaucaacuugaaaaaguggcaccgagucggugc

SEQ ID NO: 33122 - RNA, 114 nt, Artificial Sequence
  chemically synthesized
  misc_feature (1)..(30): n is a, c, g, u, or other and this region may encompass 17-30 nucleotides;
  misc_feature (107)..(114): This region may encompass 1-8 urasil;
nnnnnnnnnnnnnnnnnnnnnnnnnnnnnnguuuuagagcuagaaauagcaaguuaaaauaaggcuaguccguuaucaacuugaaaaaguggcaccgagucggugcuuuuuuuu

SEQ ID NO: 33123 - protein, 9 aa, Unknown
  Description of Unknown: Homing endonuclease sequence
LAGLIDADG
